United States Patent Application Publication US 2026/0256945 A1 - sequence listing, part 5

SEQ ID NO: 6894 - protein, 2087 aa, synthetic construct
MPAAKRVKLDGGDKKYSIGLDIGTNSVGWAVITDEYKVPSKKFKVLGNTDRHSIKKNLIGALLFDSGETAEATRLKRTARRRYTRRKNRICYLQEIFSNEMAKVDDSFFHRLEESFLVEEDKKHERHPIFGNIVDEVAYHEKYPTIYHLRKKLVDSTDKADLRLIYLALAHMIKFRGHFLIEGDLNPDNSDVDKLFIQLVQTYNQLFEENPINASGVDAKAILSARLSKSRRLENLIAQLPGEKKNGLFGNLIALSLGLTPNFKSNFDLAEDAKLQLSKDTYDDDLDNLLAQIGDQYADLFLAAKNLSDAILLSDILRVNTEITKAPLSASMIKRYDEHHQDLTLLKALVRQQLPEKYKEIFFDQSKNGYAGYIDGGASQEEFYKFIKPILEKMDGTEELLVKLNREDLLRKQRTFDNGSIPHQIHLGELHAILRRQEDFYPFLKDNREKIEKILTFRIPYYVGPLARGNSRFAWMTRKSEETITPWNFEEVVDKGASAQSFIERMTNFDKNLPNEKVLPKHSLLYEYFTVYNELTKVKYVTEGMRKPAFLSGEQKKAIVDLLFKTNRKVTVKQLKEDYFKKIECFDSVEISGVEDRFNASLGTYHDLLKIIKDKDFLDNEENEDILEDIVLTLTLFEDREMIEERLKTYAHLFDDKVMKQLKRRRYTGWGRLSRKLINGIRDKQSGKTILDFLKSDGFANRNFMQLIHDDSLTFKEDIQKAQVSGQGDSLHEHIANLAGSPAIKKGILQTVKVVDELVKVMGRHKPENIVIEMARENQTTQKGQKNSRERMKRIEEGIKELGSQILKEHPVENTQLQNEKLYLYYLQNGRDMYVDQELDINRLSDYDVDHIVPQSFLKDDSIDNKVLTRSDKARGKSDNVPSEEVVKKMKNYWRQLLNAKLITQRKFDNLTKAERGGLSELDKAGFIKRQLVETRQITKHVAQILDSRMNTKYDENDKLIREVKVITLKSKLVSDFRKDFQFYKVREINNYHHAHDAYLNAVVGTALIKKYPKLESEFVYGDYKVYDVRKMIAKSEQEIGKATAKYFFYSNIMNFFKTEITLANGEIRKRPLIETNGETGEIVWDKGRDFATVRKVLSMPQVNIVKKTEVQTGGFSKESILPKRNSDKLIARKKDWDPKKYGGFDSPTVAYSVLVVAKVEKGKSKKLKSVKELLGITIMERSSFEKNPIDFLEAKGYKEVKKDLIIKLPKYSLFELENGRKRMLASAGELQKGNELALPSKYVNFLYLASHYEKLKGSPEDNEQKQLFVEQHKHYLDEIIEQISEFSKRVILADANLDKVLSAYNKHRDKPIREQAENIIHLFTLTNLGAPAAFKYFDTTIDRKRYTSTKEVLDATLIHQSITGLYETRIDLSQLGGDGGGGSGGGEAAAKGGIPWLMKKPLQLTTLVPLQEYEERLLKQTMLTGSYKEKLQSLFLKYDALWQHWENQVGHRRIKPHHIATGTVNPRPQKQYPINPKAKASIQTVINDLLKQGVLIQQNSIMNTPVYPVPKPDGKWRMVLDYREVNKTIPLIAAQNQHSAGILSSIFRGKYKTTLDLSNGFWAHSITPESYWLTAFTWLGQQYCWTRLPQGFLNSPALFNADVVDLLKEVPNVQVYVDDIYISHDDPREHLEQLEKVFSLLLNAGYVVSLKKSEIAQHEVEFLGFNITKEGRGLTETFKQKLLNITPPRDLKQLQSILGLLNFARNFIPNFSELVKPLYNIIATAPGKYITWTTDNSQQLQNIISMLNSAENLEERNPEVRLIMKVNTSPSAGYIRFYNEFAKRPIMYLNYVYTKAEVKFTNTEKLLTTIHKGLIKALDLGMGQEILVYSPIVSMTKIQKTPLPERKALPIRWITWMSYLEDPRIQFHYDKTLPELQQVPTVTDDIIAKIKHPSEFSMVFYTDGSAIKHPNVNKSHNAGMGIAQVQFKPEFTVINTWSIPLGDHTAQLAEVAAVEFACKKALKIDGPVLIVTDSFYVAESVNKELPYWQSNGFFNNKKKPLKHVSKWKSIADCIQLKPDIIIIHEKGHQPTASTFHTEGNNLADKLATQGSYVVNAGKRTADGSEFEKRTADGSEFESPKKKAKVE

SEQ ID NO: 6895 - protein, 2176 aa, synthetic construct
MPAAKRVKLDGGDKKYSIGLDIGTNSVGWAVITDEYKVPSKKFKVLGNTDRHSIKKNLIGALLFDSGETAEATRLKRTARRRYTRRKNRICYLQEIFSNEMAKVDDSFFHRLEESFLVEEDKKHERHPIFGNIVDEVAYHEKYPTIYHLRKKLVDSTDKADLRLIYLALAHMIKFRGHFLIEGDLNPDNSDVDKLFIQLVQTYNQLFEENPINASGVDAKAILSARLSKSRRLENLIAQLPGEKKNGLFGNLIALSLGLTPNFKSNFDLAEDAKLQLSKDTYDDDLDNLLAQIGDQYADLFLAAKNLSDAILLSDILRVNTEITKAPLSASMIKRYDEHHQDLTLLKALVRQQLPEKYKEIFFDQSKNGYAGYIDGGASQEEFYKFIKPILEKMDGTEELLVKLNREDLLRKQRTFDNGSIPHQIHLGELHAILRRQEDFYPFLKDNREKIEKILTFRIPYYVGPLARGNSRFAWMTRKSEETITPWNFEEVVDKGASAQSFIERMTNFDKNLPNEKVLPKHSLLYEYFTVYNELTKVKYVTEGMRKPAFLSGEQKKAIVDLLFKTNRKVTVKQLKEDYFKKIECFDSVEISGVEDRFNASLGTYHDLLKIIKDKDFLDNEENEDILEDIVLTLTLFEDREMIEERLKTYAHLFDDKVMKQLKRRRYTGWGRLSRKLINGIRDKQSGKTILDFLKSDGFANRNFMQLIHDDSLTFKEDIQKAQVSGQGDSLHEHIANLAGSPAIKKGILQTVKVVDELVKVMGRHKPENIVIEMARENQTTQKGQKNSRERMKRIEEGIKELGSQILKEHPVENTQLQNEKLYLYYLQNGRDMYVDQELDINRLSDYDVDHIVPQSFLKDDSIDNKVLTRSDKARGKSDNVPSEEVVKKMKNYWRQLLNAKLITQRKFDNLTKAERGGLSELDKAGFIKRQLVETRQITKHVAQILDSRMNTKYDENDKLIREVKVITLKSKLVSDFRKDFQFYKVREINNYHHAHDAYLNAVVGTALIKKYPKLESEFVYGDYKVYDVRKMIAKSEQEIGKATAKYFFYSNIMNFFKTEITLANGEIRKRPLIETNGETGEIVWDKGRDFATVRKVLSMPQVNIVKKTEVQTGGFSKESILPKRNSDKLIARKKDWDPKKYGGFDSPTVAYSVLVVAKVEKGKSKKLKSVKELLGITIMERSSFEKNPIDFLEAKGYKEVKKDLIIKLPKYSLFELENGRKRMLASAGELQKGNELALPSKYVNFLYLASHYEKLKGSPEDNEQKQLFVEQHKHYLDEIIEQISEFSKRVILADANLDKVLSAYNKHRDKPIREQAENIIHLFTLTNLGAPAAFKYFDTTIDRKRYTSTKEVLDATLIHQSITGLYETRIDLSQLGGDGGGGSGGGEAAAKGGMDPLQLLQPLEAEIKGTKLKAHWNSGATITCVPQAFLEEEVPIKNIWIKTIHGEKEQPVYYLTFKIQGRKVEAEVISSPYDYILVSPSDIPWLMKKPLQLTTLVPLQEYEERLLKQTMLTGSYKEKLQSLFLKYDALWQHWENQVGHRRIKPHHIATGTVNPRPQKQYPINPKAKASIQTVINDLLKQGVLIQQNSIMNTPVYPVPKPDGKWRMVLDYREVNKTIPLIAAQNQHSAGILSSIFRGKYKTTLDLSNGFWAHSITPESYWLTAFTWLGQQYCWTRLPQGFLNSPALFNADVVDLLKEVPNVQVYVDDIYISHDDPREHLEQLEKVFSLLLNAGYVVSLKKSEIAQHEVEFLGFNITKEGRGLTETFKQKLLNITPPRDLKQLQSILGLLNFARNFIPNFSELVKPLYNIIATAPGKYITWTTDNSQQLQNIISMLNSAENLEERNPEVRLIMKVNTSPSAGYIRFYNEFAKRPIMYLNYVYTKAEVKFTNTEKLLTTIHKGLIKALDLGMGQEILVYSPIVSMTKIQKTPLPERKALPIRWITWMSYLEDPRIQFHYDKTLPELQQVPTVTDDIIAKIKHPSEFSMVFYTDGSAIKHPNVNKSHNAGMGIAQVQFKPEFTVINTWSIPLGDHTAQLAEVAAVEFACKKALKIDGPVLIVTDSFYVAESVNKELPYWQSNGFFNNKKKPLKHVSKWKSIADCIQLKPDIIIIHEKGHQPTASTFHTEGNNLADKLATQGSYVVNAGKRTADGSEFEKRTADGSEFESPKKKAKVE

SEQ ID NO: 6896 - protein, 2094 aa, synthetic construct
MPAAKRVKLDGGDKKYSIGLDIGTNSVGWAVITDEYKVPSKKFKVLGNTDRHSIKKNLIGALLFDSGETAEATRLKRTARRRYTRRKNRICYLQEIFSNEMAKVDDSFFHRLEESFLVEEDKKHERHPIFGNIVDEVAYHEKYPTIYHLRKKLVDSTDKADLRLIYLALAHMIKFRGHFLIEGDLNPDNSDVDKLFIQLVQTYNQLFEENPINASGVDAKAILSARLSKSRRLENLIAQLPGEKKNGLFGNLIALSLGLTPNFKSNFDLAEDAKLQLSKDTYDDDLDNLLAQIGDQYADLFLAAKNLSDAILLSDILRVNTEITKAPLSASMIKRYDEHHQDLTLLKALVRQQLPEKYKEIFFDQSKNGYAGYIDGGASQEEFYKFIKPILEKMDGTEELLVKLNREDLLRKQRTFDNGSIPHQIHLGELHAILRRQEDFYPFLKDNREKIEKILTFRIPYYVGPLARGNSRFAWMTRKSEETITPWNFEEVVDKGASAQSFIERMTNFDKNLPNEKVLPKHSLLYEYFTVYNELTKVKYVTEGMRKPAFLSGEQKKAIVDLLFKTNRKVTVKQLKEDYFKKIECFDSVEISGVEDRFNASLGTYHDLLKIIKDKDFLDNEENEDILEDIVLTLTLFEDREMIEERLKTYAHLFDDKVMKQLKRRRYTGWGRLSRKLINGIRDKQSGKTILDFLKSDGFANRNFMQLIHDDSLTFKEDIQKAQVSGQGDSLHEHIANLAGSPAIKKGILQTVKVVDELVKVMGRHKPENIVIEMARENQTTQKGQKNSRERMKRIEEGIKELGSQILKEHPVENTQLQNEKLYLYYLQNGRDMYVDQELDINRLSDYDVDHIVPQSFLKDDSIDNKVLTRSDKARGKSDNVPSEEVVKKMKNYWRQLLNAKLITQRKFDNLTKAERGGLSELDKAGFIKRQLVETRQITKHVAQILDSRMNTKYDENDKLIREVKVITLKSKLVSDFRKDFQFYKVREINNYHHAHDAYLNAVVGTALIKKYPKLESEFVYGDYKVYDVRKMIAKSEQEIGKATAKYFFYSNIMNFFKTEITLANGEIRKRPLIETNGETGEIVWDKGRDFATVRKVLSMPQVNIVKKTEVQTGGFSKESILPKRNSDKLIARKKDWDPKKYGGFDSPTVAYSVLVVAKVEKGKSKKLKSVKELLGITIMERSSFEKNPIDFLEAKGYKEVKKDLIIKLPKYSLFELENGRKRMLASAGELQKGNELALPSKYVNFLYLASHYEKLKGSPEDNEQKQLFVEQHKHYLDEIIEQISEFSKRVILADANLDKVLSAYNKHRDKPIREQAENIIHLFTLTNLGAPAAFKYFDTTIDRKRYTSTKEVLDATLIHQSITGLYETRIDLSQLGGDGGGGSGGGEAAAKGGVLNLEEEYRLHEKPVPSSIDPSWLQLFPTVWAERAGMGLANQVPPVVVELRSGASPVAVRQYPMSKEAREGIRPHIQRFLDLGVLVPCQSPWNTPLLPVKKPGTNDYRPVQDLREINKRVQDIHPTVPNPYNLLSSLPPSHTWYSVLDLKDAFFCLKLHPNSQPLFAFEWRDPEKGNTGQLTWTRLPQGFKNSPTLFNEALHRDLAPFRALNPQVVLLQYVDDLLVAAPTYRDCKEGTQKLLQELSKLGYRVSAKKAQLCQKEVTYLGYLLKEGKRWLTPARKATVMKIPPPTTPRQVREFLGKAGFCRLFIPGFASLAAPLYPLTKPSIPFIWTEEHQKAFDRIKEALLSAPALALPDLTKPFTLYVDERAGVARGVLTQTLGPWRRPVAYLSKKLDPVASGWPTCLKAVAAVALLLKDADKLTLGQNVTVIASHSLESIVRQPPDRWMTNARMTHYQSLLLNERVSFAPPAVLNPATLLPVESEATPVHRCSEILAEETGTRRDLKDQPLPGVPAWYTDGSSFIAEGKRRAGAAIVDGKRTVWASSLPEGTSAQKAELVALTQALRLAEGKDINIYTDSRYAFATAHIHGAIYKQRGWLTSAGKDIKNKEEILALLEAIHLPKRVAIIHCPGHQKGNDPVATGNRRADEAAKQAALSTRVLAETTKPAGKRTADGSEFEKRTADGSEFESPKKKAKVE

SEQ ID NO: 6897 - protein, 2096 aa, synthetic construct
MPAAKRVKLDGGDKKYSIGLDIGTNSVGWAVITDEYKVPSKKFKVLGNTDRHSIKKNLIGALLFDSGETAEATRLKRTARRRYTRRKNRICYLQEIFSNEMAKVDDSFFHRLEESFLVEEDKKHERHPIFGNIVDEVAYHEKYPTIYHLRKKLVDSTDKADLRLIYLALAHMIKFRGHFLIEGDLNPDNSDVDKLFIQLVQTYNQLFEENPINASGVDAKAILSARLSKSRRLENLIAQLPGEKKNGLFGNLIALSLGLTPNFKSNFDLAEDAKLQLSKDTYDDDLDNLLAQIGDQYADLFLAAKNLSDAILLSDILRVNTEITKAPLSASMIKRYDEHHQDLTLLKALVRQQLPEKYKEIFFDQSKNGYAGYIDGGASQEEFYKFIKPILEKMDGTEELLVKLNREDLLRKQRTFDNGSIPHQIHLGELHAILRRQEDFYPFLKDNREKIEKILTFRIPYYVGPLARGNSRFAWMTRKSEETITPWNFEEVVDKGASAQSFIERMTNFDKNLPNEKVLPKHSLLYEYFTVYNELTKVKYVTEGMRKPAFLSGEQKKAIVDLLFKTNRKVTVKQLKEDYFKKIECFDSVEISGVEDRFNASLGTYHDLLKIIKDKDFLDNEENEDILEDIVLTLTLFEDREMIEERLKTYAHLFDDKVMKQLKRRRYTGWGRLSRKLINGIRDKQSGKTILDFLKSDGFANRNFMQLIHDDSLTFKEDIQKAQVSGQGDSLHEHIANLAGSPAIKKGILQTVKVVDELVKVMGRHKPENIVIEMARENQTTQKGQKNSRERMKRIEEGIKELGSQILKEHPVENTQLQNEKLYLYYLQNGRDMYVDQELDINRLSDYDVDHIVPQSFLKDDSIDNKVLTRSDKARGKSDNVPSEEVVKKMKNYWRQLLNAKLITQRKFDNLTKAERGGLSELDKAGFIKRQLVETRQITKHVAQILDSRMNTKYDENDKLIREVKVITLKSKLVSDFRKDFQFYKVREINNYHHAHDAYLNAVVGTALIKKYPKLESEFVYGDYKVYDVRKMIAKSEQEIGKATAKYFFYSNIMNFFKTEITLANGEIRKRPLIETNGETGEIVWDKGRDFATVRKVLSMPQVNIVKKTEVQTGGFSKESILPKRNSDKLIARKKDWDPKKYGGFDSPTVAYSVLVVAKVEKGKSKKLKSVKELLGITIMERSSFEKNPIDFLEAKGYKEVKKDLIIKLPKYSLFELENGRKRMLASAGELQKGNELALPSKYVNFLYLASHYEKLKGSPEDNEQKQLFVEQHKHYLDEIIEQISEFSKRVILADANLDKVLSAYNKHRDKPIREQAENIIHLFTLTNLGAPAAFKYFDTTIDRKRYTSTKEVLDATLIHQSITGLYETRIDLSQLGGDGGGGSGGGEAAAKGGTLNIEDEYRLHETSKEPDVPLGSTWLSDFPQAWAETGGMGLAVRQAPLIIPLKATSTPVSIKQYPMSQEARLGIKPHIQRLLDQGILVPCQSPWNTPLLPVKKPGTNDYRPVQDLREVNKRVEDIHPTVPNPYNLLSGLPPSHQWYTVLDLKDAFFCLRLHPTSQPLFAFEWRDPEMGISGQLTWTRLPQGFKNSPTLFNEALHRDLADFRIQHPDLILLQYVDDLLLAATSEQDCQRGTRALLQTLGNLGYRASAKKAQICQKQVKYLGYLLKEGQRWLTEARKETVMGQPTPKTPRQLREFLGTAGFCRLWIPGFAEMAAPLYPLTKPGTLFNWGPDQQKAYQEIKQALLTAPALGLPDLTKPFELFVDEKQGYAKGVLTQKLGPWRRPVAYLSKKLDPVAAGWPPCLRMVAAIAVLTKDAGKLTMGQPLVILAPHAVEALVKQPPDRWLSNARMTHYQAMLLDTDRVQFGPVVALNPATLLPLPEKEAPHDCLEILAETHGTRPDLTDQPIPDADYTWYTDGSSFLQEGQRRAGAAVTTETEVIWARALPAGTSAQRAELIALTQALKMAEGKKLNVYTDSRYAFATAHVHGEIYRRRGWLTSEGREIKNKNEILALLKALFLPKRLSIIHCPGHQKGNSAEARGNRMADQAAREAAMKAVLETSTLLAGKRTADGSEFEKRTADGSEFESPKKKAKVE

SEQ ID NO: 6898 - protein, 2098 aa, synthetic construct
MPAAKRVKLDGGDKKYSIGLDIGTNSVGWAVITDEYKVPSKKFKVLGNTDRHSIKKNLIGALLFDSGETAEATRLKRTARRRYTRRKNRICYLQEIFSNEMAKVDDSFFHRLEESFLVEEDKKHERHPIFGNIVDEVAYHEKYPTIYHLRKKLVDSTDKADLRLIYLALAHMIKFRGHFLIEGDLNPDNSDVDKLFIQLVQTYNQLFEENPINASGVDAKAILSARLSKSRRLENLIAQLPGEKKNGLFGNLIALSLGLTPNFKSNFDLAEDAKLQLSKDTYDDDLDNLLAQIGDQYADLFLAAKNLSDAILLSDILRVNTEITKAPLSASMIKRYDEHHQDLTLLKALVRQQLPEKYKEIFFDQSKNGYAGYIDGGASQEEFYKFIKPILEKMDGTEELLVKLNREDLLRKQRTFDNGSIPHQIHLGELHAILRRQEDFYPFLKDNREKIEKILTFRIPYYVGPLARGNSRFAWMTRKSEETITPWNFEEVVDKGASAQSFIERMTNFDKNLPNEKVLPKHSLLYEYFTVYNELTKVKYVTEGMRKPAFLSGEQKKAIVDLLFKTNRKVTVKQLKEDYFKKIECFDSVEISGVEDRFNASLGTYHDLLKIIKDKDFLDNEENEDILEDIVLTLTLFEDREMIEERLKTYAHLFDDKVMKQLKRRRYTGWGRLSRKLINGIRDKQSGKTILDFLKSDGFANRNFMQLIHDDSLTFKEDIQKAQVSGQGDSLHEHIANLAGSPAIKKGILQTVKVVDELVKVMGRHKPENIVIEMARENQTTQKGQKNSRERMKRIEEGIKELGSQILKEHPVENTQLQNEKLYLYYLQNGRDMYVDQELDINRLSDYDVDHIVPQSFLKDDSIDNKVLTRSDKARGKSDNVPSEEVVKKMKNYWRQLLNAKLITQRKFDNLTKAERGGLSELDKAGFIKRQLVETRQITKHVAQILDSRMNTKYDENDKLIREVKVITLKSKLVSDFRKDFQFYKVREINNYHHAHDAYLNAVVGTALIKKYPKLESEFVYGDYKVYDVRKMIAKSEQEIGKATAKYFFYSNIMNFFKTEITLANGEIRKRPLIETNGETGEIVWDKGRDFATVRKVLSMPQVNIVKKTEVQTGGFSKESILPKRNSDKLIARKKDWDPKKYGGFDSPTVAYSVLVVAKVEKGKSKKLKSVKELLGITIMERSSFEKNPIDFLEAKGYKEVKKDLIIKLPKYSLFELENGRKRMLASAGELQKGNELALPSKYVNFLYLASHYEKLKGSPEDNEQKQLFVEQHKHYLDEIIEQISEFSKRVILADANLDKVLSAYNKHRDKPIREQAENIIHLFTLTNLGAPAAFKYFDTTIDRKRYTSTKEVLDATLIHQSITGLYETRIDLSQLGGDGGGGSEAAAKGGGGGTAPLEEEYRLFLEAPIQNVTLLEQWKREIPKVWAEINPPGLASTQAPIHVQLLSTALPVRVRQYPITLEAKRSLRETIRKFRAAGILRPVHSPWNTPLLPVRKSGTSEYRMVQDLREVNKRVETIHPTVPNPYTLLSLLPPDRIWYSVLDLKDAFFCIPLAPESQLIFAFEWADAEEGESGQLTWTRLPQGFKNSPTLFNEALNRDLQGFRLDHPSVSLLQYVDDLLIAADTQAACLSATRDLLMTLAELGYRVSGKKAQLCQEEVTYLGFKIHKGSRSLSNSRTQAILQIPVPKTKRQVREFLGTIGYCRLWIPGFAELAQPLYAATRPGNDPLVWGEKEEEAFQSLKLALTQPPALALPSLDKPFQLFVEETSGAAKGVLTQALGPWKRPVAYLSKRLDPVAAGWPRCLRAIAAAALLTREASKLTFGQDIEITSSHNLESLLRSPPDKWLTNARITQYQVLLLDPPRVRFKQTAALNPATLLPETDDTLPIHHCLDTLDSLTSTRPDLTDQPLAQAEATLFTDGSSYIRDGKRYAGAAVVTLDSVIWAEPLPIGTSAQKAELIALTKALEWSKDKSVNIYTDSRYAFATLHVHGMIYRERGWLTAGGKAIKNAPEILALLTAVWLPKRVAVMHCKGHQKDDAPTSTGNRRADEVAREVAIRPLSTQATISAGKRTADGSEFEKRTADGSEFESPKKKAKVE

SEQ ID NO: 6899 - protein, 2102 aa, synthetic construct
MPAAKRVKLDGGDKKYSIGLDIGTNSVGWAVITDEYKVPSKKFKVLGNTDRHSIKKNLIGALLFDSGETAEATRLKRTARRRYTRRKNRICYLQEIFSNEMAKVDDSFFHRLEESFLVEEDKKHERHPIFGNIVDEVAYHEKYPTIYHLRKKLVDSTDKADLRLIYLALAHMIKFRGHFLIEGDLNPDNSDVDKLFIQLVQTYNQLFEENPINASGVDAKAILSARLSKSRRLENLIAQLPGEKKNGLFGNLIALSLGLTPNFKSNFDLAEDAKLQLSKDTYDDDLDNLLAQIGDQYADLFLAAKNLSDAILLSDILRVNTEITKAPLSASMIKRYDEHHQDLTLLKALVRQQLPEKYKEIFFDQSKNGYAGYIDGGASQEEFYKFIKPILEKMDGTEELLVKLNREDLLRKQRTFDNGSIPHQIHLGELHAILRRQEDFYPFLKDNREKIEKILTFRIPYYVGPLARGNSRFAWMTRKSEETITPWNFEEVVDKGASAQSFIERMTNFDKNLPNEKVLPKHSLLYEYFTVYNELTKVKYVTEGMRKPAFLSGEQKKAIVDLLFKTNRKVTVKQLKEDYFKKIECFDSVEISGVEDRFNASLGTYHDLLKIIKDKDFLDNEENEDILEDIVLTLTLFEDREMIEERLKTYAHLFDDKVMKQLKRRRYTGWGRLSRKLINGIRDKQSGKTILDFLKSDGFANRNFMQLIHDDSLTFKEDIQKAQVSGQGDSLHEHIANLAGSPAIKKGILQTVKVVDELVKVMGRHKPENIVIEMARENQTTQKGQKNSRERMKRIEEGIKELGSQILKEHPVENTQLQNEKLYLYYLQNGRDMYVDQELDINRLSDYDVDHIVPQSFLKDDSIDNKVLTRSDKARGKSDNVPSEEVVKKMKNYWRQLLNAKLITQRKFDNLTKAERGGLSELDKAGFIKRQLVETRQITKHVAQILDSRMNTKYDENDKLIREVKVITLKSKLVSDFRKDFQFYKVREINNYHHAHDAYLNAVVGTALIKKYPKLESEFVYGDYKVYDVRKMIAKSEQEIGKATAKYFFYSNIMNFFKTEITLANGEIRKRPLIETNGETGEIVWDKGRDFATVRKVLSMPQVNIVKKTEVQTGGFSKESILPKRNSDKLIARKKDWDPKKYGGFDSPTVAYSVLVVAKVEKGKSKKLKSVKELLGITIMERSSFEKNPIDFLEAKGYKEVKKDLIIKLPKYSLFELENGRKRMLASAGELQKGNELALPSKYVNFLYLASHYEKLKGSPEDNEQKQLFVEQHKHYLDEIIEQISEFSKRVILADANLDKVLSAYNKHRDKPIREQAENIIHLFTLTNLGAPAAFKYFDTTIDRKRYTSTKEVLDATLIHQSITGLYETRIDLSQLGGDGGGGSEAAAKGGGGGTVSLQDEHRLFDIPVTTSLPDVWLQDFPQAWAETGGLGRAKCQAPIIIDLKPTAVPVSIKQYPMSLEAHMGIRQHIIKFLELGVLRPCRSPWNTPLLPVKKPGTQDYRPVQDLREINKRTVDIHPTVPNPYNLLSTLKPDYSWYTVLDLKDAFFCLPLAPQSQELFAFEWKDPERGISGQLTWTRLPQGFKNSPTLFNEALHRDLTDFRTQHPEVTLLQYVDDLLLAAPTKKACTQGTRHLLQELGEKGYRASAKKAQICQTKVTYLGYILSEGKRWLTPGRIETVARIPPPRNPREVREFLGTAGFCRLWIPGFAELAAPLYALTKPSTPFTWQTEHQLAFEALKKALLSAPALGLPDTSKPFTLFLDERQGIAKGVLTQKLGPWKRPVAYLSKKLDPVAAGWPPCLRIMAATAMLVKDSAKLTLGQPLTVITPHTLEAIVRQPPDRWITNARLTHYQALLLDTDRVQFGPPVTLNPATLLPVPENQPSPHDCRQVLAETHGTREDLKDQELPDADHTWYTDGSSYLDSGTRRAGAAVVDGHNTIWAQSLPPGTSAQKAELIALTKALELSKGKKANIYTDSRYAFATAHTHGSIYERRGWLTSEGKEIKNKAEIIALLKALFLPQEVAIIHCPGHQKGQDPVAVGNRQADRVARQAAMAEVLTLATEPDNTSHITAGKRTADGSEFEKRTADGSEFESPKKKAKVE

SEQ ID NO: 6900 - protein, 2087 aa, synthetic construct
MPAAKRVKLDGGDKKYSIGLDIGTNSVGWAVITDEYKVPSKKFKVLGNTDRHSIKKNLIGALLFDSGETAEATRLKRTARRRYTRRKNRICYLQEIFSNEMAKVDDSFFHRLEESFLVEEDKKHERHPIFGNIVDEVAYHEKYPTIYHLRKKLVDSTDKADLRLIYLALAHMIKFRGHFLIEGDLNPDNSDVDKLFIQLVQTYNQLFEENPINASGVDAKAILSARLSKSRRLENLIAQLPGEKKNGLFGNLIALSLGLTPNFKSNFDLAEDAKLQLSKDTYDDDLDNLLAQIGDQYADLFLAAKNLSDAILLSDILRVNTEITKAPLSASMIKRYDEHHQDLTLLKALVRQQLPEKYKEIFFDQSKNGYAGYIDGGASQEEFYKFIKPILEKMDGTEELLVKLNREDLLRKQRTFDNGSIPHQIHLGELHAILRRQEDFYPFLKDNREKIEKILTFRIPYYVGPLARGNSRFAWMTRKSEETITPWNFEEVVDKGASAQSFIERMTNFDKNLPNEKVLPKHSLLYEYFTVYNELTKVKYVTEGMRKPAFLSGEQKKAIVDLLFKTNRKVTVKQLKEDYFKKIECFDSVEISGVEDRFNASLGTYHDLLKIIKDKDFLDNEENEDILEDIVLTLTLFEDREMIEERLKTYAHLFDDKVMKQLKRRRYTGWGRLSRKLINGIRDKQSGKTILDFLKSDGFANRNFMQLIHDDSLTFKEDIQKAQVSGQGDSLHEHIANLAGSPAIKKGILQTVKVVDELVKVMGRHKPENIVIEMARENQTTQKGQKNSRERMKRIEEGIKELGSQILKEHPVENTQLQNEKLYLYYLQNGRDMYVDQELDINRLSDYDVDHIVPQSFLKDDSIDNKVLTRSDKARGKSDNVPSEEVVKKMKNYWRQLLNAKLITQRKFDNLTKAERGGLSELDKAGFIKRQLVETRQITKHVAQILDSRMNTKYDENDKLIREVKVITLKSKLVSDFRKDFQFYKVREINNYHHAHDAYLNAVVGTALIKKYPKLESEFVYGDYKVYDVRKMIAKSEQEIGKATAKYFFYSNIMNFFKTEITLANGEIRKRPLIETNGETGEIVWDKGRDFATVRKVLSMPQVNIVKKTEVQTGGFSKESILPKRNSDKLIARKKDWDPKKYGGFDSPTVAYSVLVVAKVEKGKSKKLKSVKELLGITIMERSSFEKNPIDFLEAKGYKEVKKDLIIKLPKYSLFELENGRKRMLASAGELQKGNELALPSKYVNFLYLASHYEKLKGSPEDNEQKQLFVEQHKHYLDEIIEQISEFSKRVILADANLDKVLSAYNKHRDKPIREQAENIIHLFTLTNLGAPAAFKYFDTTIDRKRYTSTKEVLDATLIHQSITGLYETRIDLSQLGGDGGGGSEAAAKGGGGGVPWILKKPLELTIKLDLEEQQGTLLNNSILSKKGKEELKQLFEKYSALWQSWENQVGHRRIRPHKIATGTVKPTPQKQYHINPKAKPDIQIVINDLLKQGVLIQKESTMNTPVYPVPKPNGRWRMVLDYRAVNKVTPLIAVQNQHSYGILGSLFKGRYKTTIDLSNGFWAHPIVPEDYWITAFTWQGKQYCWTVLPQGFLNSPGLFTGDVVDLLQGIPNVEVYVDDVYISHDSEKEHLEYLDILFNRLKEAGYIISLKKSNIANSIVDFLGFQITNEGRGLTDTFKEKLENITAPTTLKQLQSILGLLNFARNFIPDFTELIAPLYALIPKSTKNYVPWQIEHSTTLETLITKLNGAEYLQGRKGDKTLIMKVNASYTTGYIRYYNEGEKKPISYVSIVFSKTELKFTELEKLLTTVHKGLLKALDLSMGQNIHVYSPIVSMQNIQKTPQTAKKALASRWLSWLSYLEDPRIRFFYDPQMPALKDLPAVDTGKDNKKHPSNFQHIFYTDGSAITSPTKEGHLNAGMGIVYFINKDGNLQKQQEWSISLGNHTAQFAEIAAFEFALKKCLPLGGNILVVTDSNYVAKAYNEELDVWASNGFVNNRKKPLKHISKWKSVADLKRLRPDVVVTHEPGHQKLDSSPHAYGNNLADQLATQASFKVHAGKRTADGSEFEKRTADGSEFESPKKKAKVE

SEQ ID NO: 6901 - protein, 2096 aa, synthetic construct
MPAAKRVKLDGGDKKYSIGLDIGTNSVGWAVITDEYKVPSKKFKVLGNTDRHSIKKNLIGALLFDSGETAEATRLKRTARRRYTRRKNRICYLQEIFSNEMAKVDDSFFHRLEESFLVEEDKKHERHPIFGNIVDEVAYHEKYPTIYHLRKKLVDSTDKADLRLIYLALAHMIKFRGHFLIEGDLNPDNSDVDKLFIQLVQTYNQLFEENPINASGVDAKAILSARLSKSRRLENLIAQLPGEKKNGLFGNLIALSLGLTPNFKSNFDLAEDAKLQLSKDTYDDDLDNLLAQIGDQYADLFLAAKNLSDAILLSDILRVNTEITKAPLSASMIKRYDEHHQDLTLLKALVRQQLPEKYKEIFFDQSKNGYAGYIDGGASQEEFYKFIKPILEKMDGTEELLVKLNREDLLRKQRTFDNGSIPHQIHLGELHAILRRQEDFYPFLKDNREKIEKILTFRIPYYVGPLARGNSRFAWMTRKSEETITPWNFEEVVDKGASAQSFIERMTNFDKNLPNEKVLPKHSLLYEYFTVYNELTKVKYVTEGMRKPAFLSGEQKKAIVDLLFKTNRKVTVKQLKEDYFKKIECFDSVEISGVEDRFNASLGTYHDLLKIIKDKDFLDNEENEDILEDIVLTLTLFEDREMIEERLKTYAHLFDDKVMKQLKRRRYTGWGRLSRKLINGIRDKQSGKTILDFLKSDGFANRNFMQLIHDDSLTFKEDIQKAQVSGQGDSLHEHIANLAGSPAIKKGILQTVKVVDELVKVMGRHKPENIVIEMARENQTTQKGQKNSRERMKRIEEGIKELGSQILKEHPVENTQLQNEKLYLYYLQNGRDMYVDQELDINRLSDYDVDHIVPQSFLKDDSIDNKVLTRSDKARGKSDNVPSEEVVKKMKNYWRQLLNAKLITQRKFDNLTKAERGGLSELDKAGFIKRQLVETRQITKHVAQILDSRMNTKYDENDKLIREVKVITLKSKLVSDFRKDFQFYKVREINNYHHAHDAYLNAVVGTALIKKYPKLESEFVYGDYKVYDVRKMIAKSEQEIGKATAKYFFYSNIMNFFKTEITLANGEIRKRPLIETNGETGEIVWDKGRDFATVRKVLSMPQVNIVKKTEVQTGGFSKESILPKRNSDKLIARKKDWDPKKYGGFDSPTVAYSVLVVAKVEKGKSKKLKSVKELLGITIMERSSFEKNPIDFLEAKGYKEVKKDLIIKLPKYSLFELENGRKRMLASAGELQKGNELALPSKYVNFLYLASHYEKLKGSPEDNEQKQLFVEQHKHYLDEIIEQISEFSKRVILADANLDKVLSAYNKHRDKPIREQAENIIHLFTLTNLGAPAAFKYFDTTIDRKRYTSTKEVLDATLIHQSITGLYETRIDLSQLGGDGGGGSEAAAKGGGGGTLNLEDEYRLYETSAEPEVSPGSTWLSDFPQAWAETGGMGLAVRQAPLIIPLKATSTPVSIKQYPMSQEAKLGIKPHIQRLLDQGILVPCQSPWNTPLLPVKKPGTNDYRPVQDLREVNKRVEDIHPTVPNPYNLLSGLPPSHRWYTVLDLKDAFFCLRLHPTSQPLFAFEWRDPGMGISGQLTWTRLPQGFKNSPTLFNEALHRDLADFRIQHPDLILLQYVDDILLAATSELDCQQGTRALLLTLGNLGYRASAKKAQLCQKQVKYLGYLLKEGQRWLTEARKETVMGQPTPKTPRQLREFLGTAGFCRLWIPGFAEMAAPLYPLTKPGTLFNWGPDQQKAYQEIKQALLTAPALGLPDLTKPFELFVDEKQGYAKGVLTQKLGPWRRPVAYLSKKLDPVAAGWPPCLRMVAAIAVLRKDAGKLTMGQPLVILAPHAVEALVKQPPDRWLSNARMTHYQAMLLDTDRVQFGPVVALNPATLLPLPEEGAPHDCLEILAETHGTRPDLTDQPIPDADHTWYTDGSSFLQEGQRKAGAAVTTETEVIWARALPAGTSAQRAELIALTQALKMAEGKRLNVYTDSRYAFATAHIHGEIYRRRGWLTSEGREIKNKSEILALLKALFLPKRLSIIHCLGHQKGDSAEARGNRLADQAAREAAIKTPPDTSTLLAGKRTADGSEFEKRTADGSEFESPKKKAKVE

SEQ ID NO: 6902 - protein, 2096 aa, synthetic construct
MPAAKRVKLDGGDKKYSIGLDIGTNSVGWAVITDEYKVPSKKFKVLGNTDRHSIKKNLIGALLFDSGETAEATRLKRTARRRYTRRKNRICYLQEIFSNEMAKVDDSFFHRLEESFLVEEDKKHERHPIFGNIVDEVAYHEKYPTIYHLRKKLVDSTDKADLRLIYLALAHMIKFRGHFLIEGDLNPDNSDVDKLFIQLVQTYNQLFEENPINASGVDAKAILSARLSKSRRLENLIAQLPGEKKNGLFGNLIALSLGLTPNFKSNFDLAEDAKLQLSKDTYDDDLDNLLAQIGDQYADLFLAAKNLSDAILLSDILRVNTEITKAPLSASMIKRYDEHHQDLTLLKALVRQQLPEKYKEIFFDQSKNGYAGYIDGGASQEEFYKFIKPILEKMDGTEELLVKLNREDLLRKQRTFDNGSIPHQIHLGELHAILRRQEDFYPFLKDNREKIEKILTFRIPYYVGPLARGNSRFAWMTRKSEETITPWNFEEVVDKGASAQSFIERMTNFDKNLPNEKVLPKHSLLYEYFTVYNELTKVKYVTEGMRKPAFLSGEQKKAIVDLLFKTNRKVTVKQLKEDYFKKIECFDSVEISGVEDRFNASLGTYHDLLKIIKDKDFLDNEENEDILEDIVLTLTLFEDREMIEERLKTYAHLFDDKVMKQLKRRRYTGWGRLSRKLINGIRDKQSGKTILDFLKSDGFANRNFMQLIHDDSLTFKEDIQKAQVSGQGDSLHEHIANLAGSPAIKKGILQTVKVVDELVKVMGRHKPENIVIEMARENQTTQKGQKNSRERMKRIEEGIKELGSQILKEHPVENTQLQNEKLYLYYLQNGRDMYVDQELDINRLSDYDVDHIVPQSFLKDDSIDNKVLTRSDKARGKSDNVPSEEVVKKMKNYWRQLLNAKLITQRKFDNLTKAERGGLSELDKAGFIKRQLVETRQITKHVAQILDSRMNTKYDENDKLIREVKVITLKSKLVSDFRKDFQFYKVREINNYHHAHDAYLNAVVGTALIKKYPKLESEFVYGDYKVYDVRKMIAKSEQEIGKATAKYFFYSNIMNFFKTEITLANGEIRKRPLIETNGETGEIVWDKGRDFATVRKVLSMPQVNIVKKTEVQTGGFSKESILPKRNSDKLIARKKDWDPKKYGGFDSPTVAYSVLVVAKVEKGKSKKLKSVKELLGITIMERSSFEKNPIDFLEAKGYKEVKKDLIIKLPKYSLFELENGRKRMLASAGELQKGNELALPSKYVNFLYLASHYEKLKGSPEDNEQKQLFVEQHKHYLDEIIEQISEFSKRVILADANLDKVLSAYNKHRDKPIREQAENIIHLFTLTNLGAPAAFKYFDTTIDRKRYTSTKEVLDATLIHQSITGLYETRIDLSQLGGDGGGGSEAAAKGGGGGTLNIEDEYRLHETSKGPDVPLGSTWLSDFPQAWAETGGMGLAVRQAPLIIPLKATSTPVSIKQYPMSQEARLGIKPHIQRLLDQGILVPCQSPWNTPLLPVKKPGTNDYRPVQDLREVNKRVEDIHPTVPNPYNLLSGLPPSHQWYTVLDLKDAFFCLRLHPTSQSLFAFEWRDPEMGISGQLTWTRLPQGFKNSPTLFNEALHRDLADFRIQHPDLILLQYVDDLLLAATSELDCQQGTRALLQTLGDLGYRASAKKAQICQKQVKYLGYLLKEGQRWLTEARKETVMGQPTPKTPRQLREFLGTAGFCRLWIPGFAEMAAPLYPLTKPGTLFEWGPDQQKAYQEIKQALLTAPALGLPDLTKPFELFVDEKQGYAKGVLTQKLGPWRRPVAYLSKKLDPVAAGWPPCLRMVAAIAVLTKDAGKLTMGQPLVILAPHAVEALVKQPPDRWLSNARMTHYQALLLDTDRVQFGPIVALNPATLLPLPEEGLQHDCLDILAEAHGTRPDLTDQPLPDADHTWYTDGSSFLQEGQRKAGAAVTTETEVVWAKALPAGTSAQRAELIALTQALKMAEGKKLNVYTDSRYAFATAHIHGEIYRRRGWLTSEGKEIKNKDEILALLKALFLPKRLSIIHCPGHQKGNRAEARGNRMADQAAREVATRETPETSTLLAGKRTADGSEFEKRTADGSEFESPKKKAKVE

SEQ ID NO: 6903 - protein, 2096 aa, synthetic construct
MPAAKRVKLDGGDKKYSIGLDIGTNSVGWAVITDEYKVPSKKFKVLGNTDRHSIKKNLIGALLFDSGETAEATRLKRTARRRYTRRKNRICYLQEIFSNEMAKVDDSFFHRLEESFLVEEDKKHERHPIFGNIVDEVAYHEKYPTIYHLRKKLVDSTDKADLRLIYLALAHMIKFRGHFLIEGDLNPDNSDVDKLFIQLVQTYNQLFEENPINASGVDAKAILSARLSKSRRLENLIAQLPGEKKNGLFGNLIALSLGLTPNFKSNFDLAEDAKLQLSKDTYDDDLDNLLAQIGDQYADLFLAAKNLSDAILLSDILRVNTEITKAPLSASMIKRYDEHHQDLTLLKALVRQQLPEKYKEIFFDQSKNGYAGYIDGGASQEEFYKFIKPILEKMDGTEELLVKLNREDLLRKQRTFDNGSIPHQIHLGELHAILRRQEDFYPFLKDNREKIEKILTFRIPYYVGPLARGNSRFAWMTRKSEETITPWNFEEVVDKGASAQSFIERMTNFDKNLPNEKVLPKHSLLYEYFTVYNELTKVKYVTEGMRKPAFLSGEQKKAIVDLLFKTNRKVTVKQLKEDYFKKIECFDSVEISGVEDRFNASLGTYHDLLKIIKDKDFLDNEENEDILEDIVLTLTLFEDREMIEERLKTYAHLFDDKVMKQLKRRRYTGWGRLSRKLINGIRDKQSGKTILDFLKSDGFANRNFMQLIHDDSLTFKEDIQKAQVSGQGDSLHEHIANLAGSPAIKKGILQTVKVVDELVKVMGRHKPENIVIEMARENQTTQKGQKNSRERMKRIEEGIKELGSQILKEHPVENTQLQNEKLYLYYLQNGRDMYVDQELDINRLSDYDVDHIVPQSFLKDDSIDNKVLTRSDKARGKSDNVPSEEVVKKMKNYWRQLLNAKLITQRKFDNLTKAERGGLSELDKAGFIKRQLVETRQITKHVAQILDSRMNTKYDENDKLIREVKVITLKSKLVSDFRKDFQFYKVREINNYHHAHDAYLNAVVGTALIKKYPKLESEFVYGDYKVYDVRKMIAKSEQEIGKATAKYFFYSNIMNFFKTEITLANGEIRKRPLIETNGETGEIVWDKGRDFATVRKVLSMPQVNIVKKTEVQTGGFSKESILPKRNSDKLIARKKDWDPKKYGGFDSPTVAYSVLVVAKVEKGKSKKLKSVKELLGITIMERSSFEKNPIDFLEAKGYKEVKKDLIIKLPKYSLFELENGRKRMLASAGELQKGNELALPSKYVNFLYLASHYEKLKGSPEDNEQKQLFVEQHKHYLDEIIEQISEFSKRVILADANLDKVLSAYNKHRDKPIREQAENIIHLFTLTNLGAPAAFKYFDTTIDRKRYTSTKEVLDATLIHQSITGLYETRIDLSQLGGDGGGGSEAAAKGGGGGTLNIEDEYRLHEISTEPDVSPGSTWLSDFPQAWAETGGMGLAVRQAPLIIPLKATSTPVSIKQYPMSQEAKLGIKPHIQRLLDQGILVPCQSPWNTPLLPVKKPGTNDYRPVQGLREVNKRVEDIHPTVPNPYNLLSGLPTSHRWYTVLDLKDAFFCLRLHPTSQPLFASEWRDPGMGISGQLTWTRLPQGFKNSPTLFNEALHRGLADFRIQHPDLILLQYVDDLLLAATSELDCQQGTRALLKTLGNLGYRASAKKAQICQKQVKYLGYLLREGQRWLTEARKETVMGQPTPKTPRQLREFLGTAGFCRLWIPRFAEMAAPLYPLTKPGTLFNWGPDQQKAYHEIKQALLTAPALGLPDLTKPFELFVDEKQGYAKGVLTQKLGPWRRPVAYLSKKLDPVAAGWPPCLRMVAAIAVLTKDAGKLTMGQPLVILAPHAVEALVKQPPDRWLSNARMTHYQAMLLDTDRVQFGPVVALNPATLLPLPEEGAPHDCLEILAETHGTEPDLTDQPIPDADHTWYTDGSSFLQEGQRKAGAAVTTETEVIWARALPAGTSAQRAELIALTQALKMAEGKRLNVYTDSRYAFATAHIHGEIYKRRGWLTSEGREIKNKSEILALLKALFLPKRLSIIHCLGHQKGDSAEARGNRLADQAAREAAIKTPPDTSTLLAGKRTADGSEFEKRTADGSEFESPKKKAKVE

SEQ ID NO: 6904 - protein, 2090 aa, synthetic construct
MPAAKRVKLDGGDKKYSIGLDIGTNSVGWAVITDEYKVPSKKFKVLGNTDRHSIKKNLIGALLFDSGETAEATRLKRTARRRYTRRKNRICYLQEIFSNEMAKVDDSFFHRLEESFLVEEDKKHERHPIFGNIVDEVAYHEKYPTIYHLRKKLVDSTDKADLRLIYLALAHMIKFRGHFLIEGDLNPDNSDVDKLFIQLVQTYNQLFEENPINASGVDAKAILSARLSKSRRLENLIAQLPGEKKNGLFGNLIALSLGLTPNFKSNFDLAEDAKLQLSKDTYDDDLDNLLAQIGDQYADLFLAAKNLSDAILLSDILRVNTEITKAPLSASMIKRYDEHHQDLTLLKALVRQQLPEKYKEIFFDQSKNGYAGYIDGGASQEEFYKFIKPILEKMDGTEELLVKLNREDLLRKQRTFDNGSIPHQIHLGELHAILRRQEDFYPFLKDNREKIEKILTFRIPYYVGPLARGNSRFAWMTRKSEETITPWNFEEVVDKGASAQSFIERMTNFDKNLPNEKVLPKHSLLYEYFTVYNELTKVKYVTEGMRKPAFLSGEQKKAIVDLLFKTNRKVTVKQLKEDYFKKIECFDSVEISGVEDRFNASLGTYHDLLKIIKDKDFLDNEENEDILEDIVLTLTLFEDREMIEERLKTYAHLFDDKVMKQLKRRRYTGWGRLSRKLINGIRDKQSGKTILDFLKSDGFANRNFMQLIHDDSLTFKEDIQKAQVSGQGDSLHEHIANLAGSPAIKKGILQTVKVVDELVKVMGRHKPENIVIEMARENQTTQKGQKNSRERMKRIEEGIKELGSQILKEHPVENTQLQNEKLYLYYLQNGRDMYVDQELDINRLSDYDVDHIVPQSFLKDDSIDNKVLTRSDKARGKSDNVPSEEVVKKMKNYWRQLLNAKLITQRKFDNLTKAERGGLSELDKAGFIKRQLVETRQITKHVAQILDSRMNTKYDENDKLIREVKVITLKSKLVSDFRKDFQFYKVREINNYHHAHDAYLNAVVGTALIKKYPKLESEFVYGDYKVYDVRKMIAKSEQEIGKATAKYFFYSNIMNFFKTEITLANGEIRKRPLIETNGETGEIVWDKGRDFATVRKVLSMPQVNIVKKTEVQTGGFSKESILPKRNSDKLIARKKDWDPKKYGGFDSPTVAYSVLVVAKVEKGKSKKLKSVKELLGITIMERSSFEKNPIDFLEAKGYKEVKKDLIIKLPKYSLFELENGRKRMLASAGELQKGNELALPSKYVNFLYLASHYEKLKGSPEDNEQKQLFVEQHKHYLDEIIEQISEFSKRVILADANLDKVLSAYNKHRDKPIREQAENIIHLFTLTNLGAPAAFKYFDTTIDRKRYTSTKEVLDATLIHQSITGLYETRIDLSQLGGDGGGGSEAAAKGGGGGTLQLDDEYRLYSPLVKPDQNIQFWLEQFPQAWAETAGMGLAKQVPPQVIQLKASATPVSVRQYPLSKEAQEGIRPHVQRLIQQGILVPVQSPWNTPLLPVRKPGTNDYRPVQDLREVNKRVQDIHPTVPNPYNLLCALPPQRSWYTVLDLKDAFFCLRLHPTSQPLFAFEWRDPGTGRTGQLTWTRLPQGFKNSPTIFDEALHRDLANFRIQHPQVTLLQYVDDLLLAGATKQDCLEGTKALLLELSDLGYRASAKKAQICRREVTYLGYSLRDGQRWLTEARKKTVVQIPAPTTAKQVREFLGTAGFCRLWIPGFATLAAPLYPLTKEKGEFSWAPEHQKAFDAIKKALLSAPALALPDVTKPFTLYVDERKGVARGVLTQTLGPWRRPVAYLSKKLDPVASGWPVCLKAIAAVAILVKDADKLTLGQNITVIAPHALENIVRQPPDRWMTNARMTHYQSLLLTERVTFAPPAALNPATLLPEETDEPVTHDCHQLLIEETGVRKDLTDIPLTGEVLTWFTDGSSYVVEGKRMAGAAVVDGTRTIWASSLPEGTSAQKAELMALTQALRLAEGKSINIYTDSRYAFATAHVHGAIYKQRGLLTSAGREIKNKEEILSLLEALHLPKRLAIIHCPGHQKAKDPISRGNQMADRVAKQAAQGVNLLAGKRTADGSEFEKRTADGSEFESPKKKAKVE

SEQ ID NO: 6905 - protein, 2096 aa, synthetic construct
MPAAKRVKLDGGDKKYSIGLDIGTNSVGWAVITDEYKVPSKKFKVLGNTDRHSIKKNLIGALLFDSGETAEATRLKRTARRRYTRRKNRICYLQEIFSNEMAKVDDSFFHRLEESFLVEEDKKHERHPIFGNIVDEVAYHEKYPTIYHLRKKLVDSTDKADLRLIYLALAHMIKFRGHFLIEGDLNPDNSDVDKLFIQLVQTYNQLFEENPINASGVDAKAILSARLSKSRRLENLIAQLPGEKKNGLFGNLIALSLGLTPNFKSNFDLAEDAKLQLSKDTYDDDLDNLLAQIGDQYADLFLAAKNLSDAILLSDILRVNTEITKAPLSASMIKRYDEHHQDLTLLKALVRQQLPEKYKEIFFDQSKNGYAGYIDGGASQEEFYKFIKPILEKMDGTEELLVKLNREDLLRKQRTFDNGSIPHQIHLGELHAILRRQEDFYPFLKDNREKIEKILTFRIPYYVGPLARGNSRFAWMTRKSEETITPWNFEEVVDKGASAQSFIERMTNFDKNLPNEKVLPKHSLLYEYFTVYNELTKVKYVTEGMRKPAFLSGEQKKAIVDLLFKTNRKVTVKQLKEDYFKKIECFDSVEISGVEDRFNASLGTYHDLLKIIKDKDFLDNEENEDILEDIVLTLTLFEDREMIEERLKTYAHLFDDKVMKQLKRRRYTGWGRLSRKLINGIRDKQSGKTILDFLKSDGFANRNFMQLIHDDSLTFKEDIQKAQVSGQGDSLHEHIANLAGSPAIKKGILQTVKVVDELVKVMGRHKPENIVIEMARENQTTQKGQKNSRERMKRIEEGIKELGSQILKEHPVENTQLQNEKLYLYYLQNGRDMYVDQELDINRLSDYDVDHIVPQSFLKDDSIDNKVLTRSDKARGKSDNVPSEEVVKKMKNYWRQLLNAKLITQRKFDNLTKAERGGLSELDKAGFIKRQLVETRQITKHVAQILDSRMNTKYDENDKLIREVKVITLKSKLVSDFRKDFQFYKVREINNYHHAHDAYLNAVVGTALIKKYPKLESEFVYGDYKVYDVRKMIAKSEQEIGKATAKYFFYSNIMNFFKTEITLANGEIRKRPLIETNGETGEIVWDKGRDFATVRKVLSMPQVNIVKKTEVQTGGFSKESILPKRNSDKLIARKKDWDPKKYGGFDSPTVAYSVLVVAKVEKGKSKKLKSVKELLGITIMERSSFEKNPIDFLEAKGYKEVKKDLIIKLPKYSLFELENGRKRMLASAGELQKGNELALPSKYVNFLYLASHYEKLKGSPEDNEQKQLFVEQHKHYLDEIIEQISEFSKRVILADANLDKVLSAYNKHRDKPIREQAENIIHLFTLTNLGAPAAFKYFDTTIDRKRYTSTKEVLDATLIHQSITGLYETRIDLSQLGGDGGGGSEAAAKGGGGGTLNIEDEYRLHETSKEPDVPLGSTWLSDFPQAWAETGGMGLAVRQAPLIIPLKATSTPVSIKQYPMSQEARLGIKPHIQRLLDQGILVPCQSPWNTPLLPVKKPGTNDYRPVQDLREVNKRVEDIHPTVPNPYNLLSGLPPSHQWYTVLDLKDAFFCLRLHPTSQPLFAFEWRDPEMGISGQLTWTRLPQGFKNSPTLFDEALHRDLADFRIQHPDLILLQYVDDLLLAATSEQDCQRGTRALLQTLGNLGYRASAKKAQICQKQVKYLGYLLKEGQRWLTEARKETVMGQPTPKTPRQLREFLGTAGFCRLWIPGFAEMAAPLYPLTKTGTLFNWGPDQQKAYQEIKQALLTAPALGLPDLTKPFELFVDEKQGYAKGVLTQKLGPWRRPVAYLSKKLDPVAAGWPPCLRMVAAIAVLTKDAGKLTMGQPLVILAPHAVEALVKQPPDRWLSNARMTHYQAMLLDTDRVQFGPVVALNPATLLPLPEKEAPHDCLEILAETHGTRPDLTDQPIPDADYTWYTDGSSFLQEGQRRAGAAVTTETEVIWARALPAGTSAQRAELIALTQALKMAEGKKLNVYTDSRYAFATAHVHGEIYRRRGLLTSEGREIKNKNEILALLKALFLPKRLSIIHCPGHQKGNSAEARGNRMADQAAREAAMKAVLETSTLLAGKRTADGSEFEKRTADGSEFESPKKKAKVE

SEQ ID NO: 6906 - protein, 2096 aa, synthetic construct
MPAAKRVKLDGGDKKYSIGLDIGTNSVGWAVITDEYKVPSKKFKVLGNTDRHSIKKNLIGALLFDSGETAEATRLKRTARRRYTRRKNRICYLQEIFSNEMAKVDDSFFHRLEESFLVEEDKKHERHPIFGNIVDEVAYHEKYPTIYHLRKKLVDSTDKADLRLIYLALAHMIKFRGHFLIEGDLNPDNSDVDKLFIQLVQTYNQLFEENPINASGVDAKAILSARLSKSRRLENLIAQLPGEKKNGLFGNLIALSLGLTPNFKSNFDLAEDAKLQLSKDTYDDDLDNLLAQIGDQYADLFLAAKNLSDAILLSDILRVNTEITKAPLSASMIKRYDEHHQDLTLLKALVRQQLPEKYKEIFFDQSKNGYAGYIDGGASQEEFYKFIKPILEKMDGTEELLVKLNREDLLRKQRTFDNGSIPHQIHLGELHAILRRQEDFYPFLKDNREKIEKILTFRIPYYVGPLARGNSRFAWMTRKSEETITPWNFEEVVDKGASAQSFIERMTNFDKNLPNEKVLPKHSLLYEYFTVYNELTKVKYVTEGMRKPAFLSGEQKKAIVDLLFKTNRKVTVKQLKEDYFKKIECFDSVEISGVEDRFNASLGTYHDLLKIIKDKDFLDNEENEDILEDIVLTLTLFEDREMIEERLKTYAHLFDDKVMKQLKRRRYTGWGRLSRKLINGIRDKQSGKTILDFLKSDGFANRNFMQLIHDDSLTFKEDIQKAQVSGQGDSLHEHIANLAGSPAIKKGILQTVKVVDELVKVMGRHKPENIVIEMARENQTTQKGQKNSRERMKRIEEGIKELGSQILKEHPVENTQLQNEKLYLYYLQNGRDMYVDQELDINRLSDYDVDHIVPQSFLKDDSIDNKVLTRSDKARGKSDNVPSEEVVKKMKNYWRQLLNAKLITQRKFDNLTKAERGGLSELDKAGFIKRQLVETRQITKHVAQILDSRMNTKYDENDKLIREVKVITLKSKLVSDFRKDFQFYKVREINNYHHAHDAYLNAVVGTALIKKYPKLESEFVYGDYKVYDVRKMIAKSEQEIGKATAKYFFYSNIMNFFKTEITLANGEIRKRPLIETNGETGEIVWDKGRDFATVRKVLSMPQVNIVKKTEVQTGGFSKESILPKRNSDKLIARKKDWDPKKYGGFDSPTVAYSVLVVAKVEKGKSKKLKSVKELLGITIMERSSFEKNPIDFLEAKGYKEVKKDLIIKLPKYSLFELENGRKRMLASAGELQKGNELALPSKYVNFLYLASHYEKLKGSPEDNEQKQLFVEQHKHYLDEIIEQISEFSKRVILADANLDKVLSAYNKHRDKPIREQAENIIHLFTLTNLGAPAAFKYFDTTIDRKRYTSTKEVLDATLIHQSITGLYETRIDLSQLGGDGGGGSEAAAKGGGGGTLNIEDEYRLHETSKEPDVPLGSTWLSDFPQAWAETGGMGLAVRQAPLIIPLKATSTPVSIKQYPMSQEARLGIKPHIQRLLDQGILVPCQSPWNTPLLPVKKPGTNDYRPVQDLREVNKRVEDIHPTVPNPYNLLSGLPPSHQWYTVLDLKDAFFCLRLHPTSQPLFAFEWRDPEMGISGQLTWTRLPQGFKNSPTLFNEALHRDLADFRIQHPDLILLQYVDDLLLAATSEQDCQRGTRALLQTLGNLGYRASAKKAQICQKQVKYLGYLLKEGQRWLTEARKETVMGQPTPKTPRQLREFLGTAGFCRLWIPGFAEMAAPLYPLTKPGTLFNWGPDQQKAYQEIKQALLTAPALGLPDLTKPFELFVDEKQGYAKGVLTQKLGPWRRPVAYLSKKLDPVAAGWPPCLRMVAAIAVLTKDAGKLTMGQPLVILAPHAVEALVKQPPDRWLSNARMTHYQAMLLDTDRVQFGPVVALNPATLLPLPEKEAPHDCLEILAETHGTRPDLTDQPIPDADYTWYTDGSSFLQEGQRRAGAAVTTETEVIWARALPAGTSAQRAELIALTQALKMAEGKKLNVYTDSRYAFATAHVHGEIYRRRGWLTSEGREIKNKNEILALLKALFLPKRLSIIHCPGHQKGNSAEARGNRMADQAAREAAMKAVLETSTLLAGKRTADGSEFEKRTADGSEFESPKKKAKVE

SEQ ID NO: 6907 - protein, 2098 aa, synthetic construct
MPAAKRVKLDGGDKKYSIGLDIGTNSVGWAVITDEYKVPSKKFKVLGNTDRHSIKKNLIGALLFDSGETAEATRLKRTARRRYTRRKNRICYLQEIFSNEMAKVDDSFFHRLEESFLVEEDKKHERHPIFGNIVDEVAYHEKYPTIYHLRKKLVDSTDKADLRLIYLALAHMIKFRGHFLIEGDLNPDNSDVDKLFIQLVQTYNQLFEENPINASGVDAKAILSARLSKSRRLENLIAQLPGEKKNGLFGNLIALSLGLTPNFKSNFDLAEDAKLQLSKDTYDDDLDNLLAQIGDQYADLFLAAKNLSDAILLSDILRVNTEITKAPLSASMIKRYDEHHQDLTLLKALVRQQLPEKYKEIFFDQSKNGYAGYIDGGASQEEFYKFIKPILEKMDGTEELLVKLNREDLLRKQRTFDNGSIPHQIHLGELHAILRRQEDFYPFLKDNREKIEKILTFRIPYYVGPLARGNSRFAWMTRKSEETITPWNFEEVVDKGASAQSFIERMTNFDKNLPNEKVLPKHSLLYEYFTVYNELTKVKYVTEGMRKPAFLSGEQKKAIVDLLFKTNRKVTVKQLKEDYFKKIECFDSVEISGVEDRFNASLGTYHDLLKIIKDKDFLDNEENEDILEDIVLTLTLFEDREMIEERLKTYAHLFDDKVMKQLKRRRYTGWGRLSRKLINGIRDKQSGKTILDFLKSDGFANRNFMQLIHDDSLTFKEDIQKAQVSGQGDSLHEHIANLAGSPAIKKGILQTVKVVDELVKVMGRHKPENIVIEMARENQTTQKGQKNSRERMKRIEEGIKELGSQILKEHPVENTQLQNEKLYLYYLQNGRDMYVDQELDINRLSDYDVDHIVPQSFLKDDSIDNKVLTRSDKARGKSDNVPSEEVVKKMKNYWRQLLNAKLITQRKFDNLTKAERGGLSELDKAGFIKRQLVETRQITKHVAQILDSRMNTKYDENDKLIREVKVITLKSKLVSDFRKDFQFYKVREINNYHHAHDAYLNAVVGTALIKKYPKLESEFVYGDYKVYDVRKMIAKSEQEIGKATAKYFFYSNIMNFFKTEITLANGEIRKRPLIETNGETGEIVWDKGRDFATVRKVLSMPQVNIVKKTEVQTGGFSKESILPKRNSDKLIARKKDWDPKKYGGFDSPTVAYSVLVVAKVEKGKSKKLKSVKELLGITIMERSSFEKNPIDFLEAKGYKEVKKDLIIKLPKYSLFELENGRKRMLASAGELQKGNELALPSKYVNFLYLASHYEKLKGSPEDNEQKQLFVEQHKHYLDEIIEQISEFSKRVILADANLDKVLSAYNKHRDKPIREQAENIIHLFTLTNLGAPAAFKYFDTTIDRKRYTSTKEVLDATLIHQSITGLYETRIDLSQLGGDGGGGGGGSEAAAKGGTAPLEEEYRLFLEAPIQNVTLLEQWKREIPKVWAEINPPGLASTQAPIHVQLLSTALPVRVRQYPITLEAKRSLRETIRKFRAAGILRPVHSPWNTPLLPVRKSGTSEYRMVQDLREVNKRVETIHPTVPNPYTLLSLLPPDRIWYSVLDLKDAFFCIPLAPESQLIFAFEWADAEEGESGQLTWTRLPQGFKNSPTLFDEALNRDLQGFRLDHPSVSLLQYVDDLLIAADTQAACLSATRDLLMTLAELGYRVSGKKAQLCQEEVTYLGFKIHKGSRSLSNSRTQAILQIPVPKTKRQVREFLGTIGYCRLWIPGFAELAQPLYAATRGGNDPLVWGEKEEEAFQSLKLALTQPPALALPSLDKPFQLFVEETSGAAKGVLTQALGPWKRPVAYLSKRLDPVAAGWPRCLRAIAAAALLTREASKLTFGQDIEITSSHNLESLLRSPPDKWLTNARITQYQVLLLDPPRVRFKQTAALNPATLLPETDDTLPIHHCLDTLDSLTSTRPDLTDQPLAQAEATLFTDGSSYIRDGKRYAGAAVVTLDSVIWAEPLPIGTSAQKAELIALTKALEWSKDKSVNIYTDSRYAFATLHVHGMIYRERGLLTAGGKAIKNAPEILALLTAVWLPKRVAVMHCKGHQKDDAPTSTGNRRADEVAREVAIRPLSTQATISAGKRTADGSEFEKRTADGSEFESPKKKAKVE

SEQ ID NO: 6908 - protein, 2098 aa, synthetic construct
MPAAKRVKLDGGDKKYSIGLDIGTNSVGWAVITDEYKVPSKKFKVLGNTDRHSIKKNLIGALLFDSGETAEATRLKRTARRRYTRRKNRICYLQEIFSNEMAKVDDSFFHRLEESFLVEEDKKHERHPIFGNIVDEVAYHEKYPTIYHLRKKLVDSTDKADLRLIYLALAHMIKFRGHFLIEGDLNPDNSDVDKLFIQLVQTYNQLFEENPINASGVDAKAILSARLSKSRRLENLIAQLPGEKKNGLFGNLIALSLGLTPNFKSNFDLAEDAKLQLSKDTYDDDLDNLLAQIGDQYADLFLAAKNLSDAILLSDILRVNTEITKAPLSASMIKRYDEHHQDLTLLKALVRQQLPEKYKEIFFDQSKNGYAGYIDGGASQEEFYKFIKPILEKMDGTEELLVKLNREDLLRKQRTFDNGSIPHQIHLGELHAILRRQEDFYPFLKDNREKIEKILTFRIPYYVGPLARGNSRFAWMTRKSEETITPWNFEEVVDKGASAQSFIERMTNFDKNLPNEKVLPKHSLLYEYFTVYNELTKVKYVTEGMRKPAFLSGEQKKAIVDLLFKTNRKVTVKQLKEDYFKKIECFDSVEISGVEDRFNASLGTYHDLLKIIKDKDFLDNEENEDILEDIVLTLTLFEDREMIEERLKTYAHLFDDKVMKQLKRRRYTGWGRLSRKLINGIRDKQSGKTILDFLKSDGFANRNFMQLIHDDSLTFKEDIQKAQVSGQGDSLHEHIANLAGSPAIKKGILQTVKVVDELVKVMGRHKPENIVIEMARENQTTQKGQKNSRERMKRIEEGIKELGSQILKEHPVENTQLQNEKLYLYYLQNGRDMYVDQELDINRLSDYDVDHIVPQSFLKDDSIDNKVLTRSDKARGKSDNVPSEEVVKKMKNYWRQLLNAKLITQRKFDNLTKAERGGLSELDKAGFIKRQLVETRQITKHVAQILDSRMNTKYDENDKLIREVKVITLKSKLVSDFRKDFQFYKVREINNYHHAHDAYLNAVVGTALIKKYPKLESEFVYGDYKVYDVRKMIAKSEQEIGKATAKYFFYSNIMNFFKTEITLANGEIRKRPLIETNGETGEIVWDKGRDFATVRKVLSMPQVNIVKKTEVQTGGFSKESILPKRNSDKLIARKKDWDPKKYGGFDSPTVAYSVLVVAKVEKGKSKKLKSVKELLGITIMERSSFEKNPIDFLEAKGYKEVKKDLIIKLPKYSLFELENGRKRMLASAGELQKGNELALPSKYVNFLYLASHYEKLKGSPEDNEQKQLFVEQHKHYLDEIIEQISEFSKRVILADANLDKVLSAYNKHRDKPIREQAENIIHLFTLTNLGAPAAFKYFDTTIDRKRYTSTKEVLDATLIHQSITGLYETRIDLSQLGGDGGGGGGGSEAAAKGGTAPLEEEYRLFLEAPIQNVTLLEQWKREIPKVWAEINPPGLASTQAPIHVQLLSTALPVRVRQYPITLEAKRSLRETIRKFRAAGILRPVHSPWNTPLLPVRKSGTSEYRMVQDLREVNKRVETIHPTVPNPYTLLSLLPPDRIWYSVLDLKDAFFCIPLAPESQLIFAFEWADAEEGESGQLTWTRLPQGFKNSPTLFNEALNRDLQGFRLDHPSVSLLQYVDDLLIAADTQAACLSATRDLLMTLAELGYRVSGKKAQLCQEEVTYLGFKIHKGSRSLSNSRTQAILQIPVPKTKRQVREFLGTIGYCRLWIPGFAELAQPLYAATRPGNDPLVWGEKEEEAFQSLKLALTQPPALALPSLDKPFQLFVEETSGAAKGVLTQALGPWKRPVAYLSKRLDPVAAGWPRCLRAIAAAALLTREASKLTFGQDIEITSSHNLESLLRSPPDKWLTNARITQYQVLLLDPPRVRFKQTAALNPATLLPETDDTLPIHHCLDTLDSLTSTRPDLTDQPLAQAEATLFTDGSSYIRDGKRYAGAAVVTLDSVIWAEPLPIGTSAQKAELIALTKALEWSKDKSVNIYTDSRYAFATLHVHGMIYRERGWLTAGGKAIKNAPEILALLTAVWLPKRVAVMHCKGHQKDDAPTSTGNRRADEVAREVAIRPLSTQATISAGKRTADGSEFEKRTADGSEFESPKKKAKVE

SEQ ID NO: 6909 - protein, 2102 aa, synthetic construct
MPAAKRVKLDGGDKKYSIGLDIGTNSVGWAVITDEYKVPSKKFKVLGNTDRHSIKKNLIGALLFDSGETAEATRLKRTARRRYTRRKNRICYLQEIFSNEMAKVDDSFFHRLEESFLVEEDKKHERHPIFGNIVDEVAYHEKYPTIYHLRKKLVDSTDKADLRLIYLALAHMIKFRGHFLIEGDLNPDNSDVDKLFIQLVQTYNQLFEENPINASGVDAKAILSARLSKSRRLENLIAQLPGEKKNGLFGNLIALSLGLTPNFKSNFDLAEDAKLQLSKDTYDDDLDNLLAQIGDQYADLFLAAKNLSDAILLSDILRVNTEITKAPLSASMIKRYDEHHQDLTLLKALVRQQLPEKYKEIFFDQSKNGYAGYIDGGASQEEFYKFIKPILEKMDGTEELLVKLNREDLLRKQRTFDNGSIPHQIHLGELHAILRRQEDFYPFLKDNREKIEKILTFRIPYYVGPLARGNSRFAWMTRKSEETITPWNFEEVVDKGASAQSFIERMTNFDKNLPNEKVLPKHSLLYEYFTVYNELTKVKYVTEGMRKPAFLSGEQKKAIVDLLFKTNRKVTVKQLKEDYFKKIECFDSVEISGVEDRFNASLGTYHDLLKIIKDKDFLDNEENEDILEDIVLTLTLFEDREMIEERLKTYAHLFDDKVMKQLKRRRYTGWGRLSRKLINGIRDKQSGKTILDFLKSDGFANRNFMQLIHDDSLTFKEDIQKAQVSGQGDSLHEHIANLAGSPAIKKGILQTVKVVDELVKVMGRHKPENIVIEMARENQTTQKGQKNSRERMKRIEEGIKELGSQILKEHPVENTQLQNEKLYLYYLQNGRDMYVDQELDINRLSDYDVDHIVPQSFLKDDSIDNKVLTRSDKARGKSDNVPSEEVVKKMKNYWRQLLNAKLITQRKFDNLTKAERGGLSELDKAGFIKRQLVETRQITKHVAQILDSRMNTKYDENDKLIREVKVITLKSKLVSDFRKDFQFYKVREINNYHHAHDAYLNAVVGTALIKKYPKLESEFVYGDYKVYDVRKMIAKSEQEIGKATAKYFFYSNIMNFFKTEITLANGEIRKRPLIETNGETGEIVWDKGRDFATVRKVLSMPQVNIVKKTEVQTGGFSKESILPKRNSDKLIARKKDWDPKKYGGFDSPTVAYSVLVVAKVEKGKSKKLKSVKELLGITIMERSSFEKNPIDFLEAKGYKEVKKDLIIKLPKYSLFELENGRKRMLASAGELQKGNELALPSKYVNFLYLASHYEKLKGSPEDNEQKQLFVEQHKHYLDEIIEQISEFSKRVILADANLDKVLSAYNKHRDKPIREQAENIIHLFTLTNLGAPAAFKYFDTTIDRKRYTSTKEVLDATLIHQSITGLYETRIDLSQLGGDGGGGGGGSEAAAKGGTVSLQDEHRLFDIPVTTSLPDVWLQDFPQAWAETGGLGRAKCQAPIIIDLKPTAVPVSIKQYPMSLEAHMGIRQHIIKFLELGVLRPCRSPWNTPLLPVKKPGTQDYRPVQDLREINKRTVDIHPTVPNPYNLLSTLKPDYSWYTVLDLKDAFFCLPLAPQSQELFAFEWKDPERGISGQLTWTRLPQGFKNSPTLFNEALHRDLTDFRTQHPEVTLLQYVDDLLLAAPTKKACTQGTRHLLQELGEKGYRASAKKAQICQTKVTYLGYILSEGKRWLTPGRIETVARIPPPRNPREVREFLGTAGFCRLWIPGFAELAAPLYALTKPSTPFTWQTEHQLAFEALKKALLSAPALGLPDTSKPFTLFLDERQGIAKGVLTQKLGPWKRPVAYLSKKLDPVAAGWPPCLRIMAATAMLVKDSAKLTLGQPLTVITPHTLEAIVRQPPDRWITNARLTHYQALLLDTDRVQFGPPVTLNPATLLPVPENQPSPHDCRQVLAETHGTREDLKDQELPDADHTWYTDGSSYLDSGTRRAGAAVVDGHNTIWAQSLPPGTSAQKAELIALTKALELSKGKKANIYTDSRYAFATAHTHGSIYERRGWLTSEGKEIKNKAEIIALLKALFLPQEVAIIHCPGHQKGQDPVAVGNRQADRVARQAAMAEVLTLATEPDNTSHITAGKRTADGSEFEKRTADGSEFESPKKKAKVE

SEQ ID NO: 6910 - protein, 2173 aa, synthetic construct
MPAAKRVKLDGGDKKYSIGLDIGTNSVGWAVITDEYKVPSKKFKVLGNTDRHSIKKNLIGALLFDSGETAEATRLKRTARRRYTRRKNRICYLQEIFSNEMAKVDDSFFHRLEESFLVEEDKKHERHPIFGNIVDEVAYHEKYPTIYHLRKKLVDSTDKADLRLIYLALAHMIKFRGHFLIEGDLNPDNSDVDKLFIQLVQTYNQLFEENPINASGVDAKAILSARLSKSRRLENLIAQLPGEKKNGLFGNLIALSLGLTPNFKSNFDLAEDAKLQLSKDTYDDDLDNLLAQIGDQYADLFLAAKNLSDAILLSDILRVNTEITKAPLSASMIKRYDEHHQDLTLLKALVRQQLPEKYKEIFFDQSKNGYAGYIDGGASQEEFYKFIKPILEKMDGTEELLVKLNREDLLRKQRTFDNGSIPHQIHLGELHAILRRQEDFYPFLKDNREKIEKILTFRIPYYVGPLARGNSRFAWMTRKSEETITPWNFEEVVDKGASAQSFIERMTNFDKNLPNEKVLPKHSLLYEYFTVYNELTKVKYVTEGMRKPAFLSGEQKKAIVDLLFKTNRKVTVKQLKEDYFKKIECFDSVEISGVEDRFNASLGTYHDLLKIIKDKDFLDNEENEDILEDIVLTLTLFEDREMIEERLKTYAHLFDDKVMKQLKRRRYTGWGRLSRKLINGIRDKQSGKTILDFLKSDGFANRNFMQLIHDDSLTFKEDIQKAQVSGQGDSLHEHIANLAGSPAIKKGILQTVKVVDELVKVMGRHKPENIVIEMARENQTTQKGQKNSRERMKRIEEGIKELGSQILKEHPVENTQLQNEKLYLYYLQNGRDMYVDQELDINRLSDYDVDHIVPQSFLKDDSIDNKVLTRSDKARGKSDNVPSEEVVKKMKNYWRQLLNAKLITQRKFDNLTKAERGGLSELDKAGFIKRQLVETRQITKHVAQILDSRMNTKYDENDKLIREVKVITLKSKLVSDFRKDFQFYKVREINNYHHAHDAYLNAVVGTALIKKYPKLESEFVYGDYKVYDVRKMIAKSEQEIGKATAKYFFYSNIMNFFKTEITLANGEIRKRPLIETNGETGEIVWDKGRDFATVRKVLSMPQVNIVKKTEVQTGGFSKESILPKRNSDKLIARKKDWDPKKYGGFDSPTVAYSVLVVAKVEKGKSKKLKSVKELLGITIMERSSFEKNPIDFLEAKGYKEVKKDLIIKLPKYSLFELENGRKRMLASAGELQKGNELALPSKYVNFLYLASHYEKLKGSPEDNEQKQLFVEQHKHYLDEIIEQISEFSKRVILADANLDKVLSAYNKHRDKPIREQAENIIHLFTLTNLGAPAAFKYFDTTIDRKRYTSTKEVLDATLIHQSITGLYETRIDLSQLGGDGGGGGGGSEAAAKGGMDLLKPLTVERKGVKIKGYWNSQADITCVPKDLLQGEEPVRQQNVTTIHGTQEGDVYYVNLKIDGRRINTEVIGTTLDYAIITPGDVPWILKKPLELTIKLDLEEQQGTLLNNSILSKKGKEELKQLFEKYSALWQSWENQVGHRRIRPHKIATGTVKPTPQKQYHINPKAKPDIQIVINDLLKQGVLIQKESTMNTPVYPVPKPNGRWRMVLDYRAVNKVTPLIAVQNQHSYGILGSLFKGRYKTTIDLSNGFWAHPIVPEDYWITAFTWQGKQYCWTVLPQGFLNSPGLFTGDVVDLLQGIPNVEVYVDDVYISHDSEKEHLEYLDILFNRLKEAGYIISLKKSNIANSIVDFLGFQITNEGRGLTDTFKEKLENITAPTTLKQLQSILGLLNFARNFIPDFTELIAPLYALIPKSTKNYVPWQIEHSTTLETLITKLNGAEYLQGRKGDKTLIMKVNASYTTGYIRYYNEGEKKPISYVSIVFSKTELKFTELEKLLTTVHKGLLKALDLSMGQNIHVYSPIVSMQNIQKTPQTAKKALASRWLSWLSYLEDPRIRFFYDPQMPALKDLPAVDTGKDNKKHPSNFQHIFYTDGSAITSPTKEGHLNAGMGIVYFINKDGNLQKQQEWSISLGNHTAQFAEIAAFEFALKKCLPLGGNILVVTDSNYVAKAYNEELDVWASNGFVNNRKKPLKHISKWKSVADLKRLRPDVVVTHEPGHQKLDSSPHAYGNNLADQLATQASFKVHAGKRTADGSEFEKRTADGSEFESPKKKAKVE

SEQ ID NO: 6911 - protein, 2095 aa, synthetic construct
MPAAKRVKLDGGDKKYSIGLDIGTNSVGWAVITDEYKVPSKKFKVLGNTDRHSIKKNLIGALLFDSGETAEATRLKRTARRRYTRRKNRICYLQEIFSNEMAKVDDSFFHRLEESFLVEEDKKHERHPIFGNIVDEVAYHEKYPTIYHLRKKLVDSTDKADLRLIYLALAHMIKFRGHFLIEGDLNPDNSDVDKLFIQLVQTYNQLFEENPINASGVDAKAILSARLSKSRRLENLIAQLPGEKKNGLFGNLIALSLGLTPNFKSNFDLAEDAKLQLSKDTYDDDLDNLLAQIGDQYADLFLAAKNLSDAILLSDILRVNTEITKAPLSASMIKRYDEHHQDLTLLKALVRQQLPEKYKEIFFDQSKNGYAGYIDGGASQEEFYKFIKPILEKMDGTEELLVKLNREDLLRKQRTFDNGSIPHQIHLGELHAILRRQEDFYPFLKDNREKIEKILTFRIPYYVGPLARGNSRFAWMTRKSEETITPWNFEEVVDKGASAQSFIERMTNFDKNLPNEKVLPKHSLLYEYFTVYNELTKVKYVTEGMRKPAFLSGEQKKAIVDLLFKTNRKVTVKQLKEDYFKKIECFDSVEISGVEDRFNASLGTYHDLLKIIKDKDFLDNEENEDILEDIVLTLTLFEDREMIEERLKTYAHLFDDKVMKQLKRRRYTGWGRLSRKLINGIRDKQSGKTILDFLKSDGFANRNFMQLIHDDSLTFKEDIQKAQVSGQGDSLHEHIANLAGSPAIKKGILQTVKVVDELVKVMGRHKPENIVIEMARENQTTQKGQKNSRERMKRIEEGIKELGSQILKEHPVENTQLQNEKLYLYYLQNGRDMYVDQELDINRLSDYDVDHIVPQSFLKDDSIDNKVLTRSDKARGKSDNVPSEEVVKKMKNYWRQLLNAKLITQRKFDNLTKAERGGLSELDKAGFIKRQLVETRQITKHVAQILDSRMNTKYDENDKLIREVKVITLKSKLVSDFRKDFQFYKVREINNYHHAHDAYLNAVVGTALIKKYPKLESEFVYGDYKVYDVRKMIAKSEQEIGKATAKYFFYSNIMNFFKTEITLANGEIRKRPLIETNGETGEIVWDKGRDFATVRKVLSMPQVNIVKKTEVQTGGFSKESILPKRNSDKLIARKKDWDPKKYGGFDSPTVAYSVLVVAKVEKGKSKKLKSVKELLGITIMERSSFEKNPIDFLEAKGYKEVKKDLIIKLPKYSLFELENGRKRMLASAGELQKGNELALPSKYVNFLYLASHYEKLKGSPEDNEQKQLFVEQHKHYLDEIIEQISEFSKRVILADANLDKVLSAYNKHRDKPIREQAENIIHLFTLTNLGAPAAFKYFDTTIDRKRYTSTKEVLDATLIHQSITGLYETRIDLSQLGGDGGGGGGGSEAAAKGGTLQLEEEYRLFEPESTQKQEMDIWLKNFPQAWAETGGMGTAHCQAPVLIQLKATATPISIRQYPMPHEAYQGIKPHIRRMLDQGILKPCQSPWNTPLLPVKKPGTEDYRPVQDLREVNKRVEDIHPTVPNPYNLLSTLPPSHPWYTVLDLKDAFFCLRLHSESQLLFAFEWRDPEIGLSGQLTWTRLPQGFKNSPTLFNEALHSDLADFRVRYPALVLLQYVDDLLLAAATRTECLEGTKALLETLGNKGYRASAKKAQICLQEVTYLGYSLKDGQRWLTKARKEAILSIPVPKNSRQVREFLGKAGYCRLFIPGFAELAAPLYPLTRPGTLFQWGTEQQLAFEDIKKALLSSPALGLPDITKPFELFIDENSGFAKGVLVQKLGPWKRPVAYLSKKLDTVASGWPPCLRMVAAIAILVKDAGKLTLGQPLTILTSHPVEALVRQPPNKWLSNARMTHYQAMLLDAERVHFGPTVSLNPATLLPLPSGGNHHDCLQILAETHGTRPDLTDQPLPDADLTWYTDGSSFIRNGEREAGAAVTTESEVIWAAPLPPGTSAQRAELIALTQALKMAEGKKLTVYTDSRYAFATTHVHGEIYRRRGWLTSEGKEIKNKNEILALLEALFLPKRLSIIHCPGHQKGDSPQAKGNRLADDTAKKAATETHSSLTVLPAGKRTADGSEFEKRTADGSEFESPKKKAKVE

SEQ ID NO: 6912 - protein, 2176 aa, synthetic construct
MPAAKRVKLDGGDKKYSIGLDIGTNSVGWAVITDEYKVPSKKFKVLGNTDRHSIKKNLIGALLFDSGETAEATRLKRTARRRYTRRKNRICYLQEIFSNEMAKVDDSFFHRLEESFLVEEDKKHERHPIFGNIVDEVAYHEKYPTIYHLRKKLVDSTDKADLRLIYLALAHMIKFRGHFLIEGDLNPDNSDVDKLFIQLVQTYNQLFEENPINASGVDAKAILSARLSKSRRLENLIAQLPGEKKNGLFGNLIALSLGLTPNFKSNFDLAEDAKLQLSKDTYDDDLDNLLAQIGDQYADLFLAAKNLSDAILLSDILRVNTEITKAPLSASMIKRYDEHHQDLTLLKALVRQQLPEKYKEIFFDQSKNGYAGYIDGGASQEEFYKFIKPILEKMDGTEELLVKLNREDLLRKQRTFDNGSIPHQIHLGELHAILRRQEDFYPFLKDNREKIEKILTFRIPYYVGPLARGNSRFAWMTRKSEETITPWNFEEVVDKGASAQSFIERMTNFDKNLPNEKVLPKHSLLYEYFTVYNELTKVKYVTEGMRKPAFLSGEQKKAIVDLLFKTNRKVTVKQLKEDYFKKIECFDSVEISGVEDRFNASLGTYHDLLKIIKDKDFLDNEENEDILEDIVLTLTLFEDREMIEERLKTYAHLFDDKVMKQLKRRRYTGWGRLSRKLINGIRDKQSGKTILDFLKSDGFANRNFMQLIHDDSLTFKEDIQKAQVSGQGDSLHEHIANLAGSPAIKKGILQTVKVVDELVKVMGRHKPENIVIEMARENQTTQKGQKNSRERMKRIEEGIKELGSQILKEHPVENTQLQNEKLYLYYLQNGRDMYVDQELDINRLSDYDVDHIVPQSFLKDDSIDNKVLTRSDKARGKSDNVPSEEVVKKMKNYWRQLLNAKLITQRKFDNLTKAERGGLSELDKAGFIKRQLVETRQITKHVAQILDSRMNTKYDENDKLIREVKVITLKSKLVSDFRKDFQFYKVREINNYHHAHDAYLNAVVGTALIKKYPKLESEFVYGDYKVYDVRKMIAKSEQEIGKATAKYFFYSNIMNFFKTEITLANGEIRKRPLIETNGETGEIVWDKGRDFATVRKVLSMPQVNIVKKTEVQTGGFSKESILPKRNSDKLIARKKDWDPKKYGGFDSPTVAYSVLVVAKVEKGKSKKLKSVKELLGITIMERSSFEKNPIDFLEAKGYKEVKKDLIIKLPKYSLFELENGRKRMLASAGELQKGNELALPSKYVNFLYLASHYEKLKGSPEDNEQKQLFVEQHKHYLDEIIEQISEFSKRVILADANLDKVLSAYNKHRDKPIREQAENIIHLFTLTNLGAPAAFKYFDTTIDRKRYTSTKEVLDATLIHQSITGLYETRIDLSQLGGDGGGGGGGSEAAAKGGMNPLQLLQPLPAEIKGTKLLAHWNSGATITCIPESFLEDEQPIKKTLIKTIHGEKQQNVYYVTFKVKGRKVEAEVIASPYEYILLSPTDVPWLTQQPLQLTILVPLQEYQEKILSKTALPEDQKQQLKTLFVKYDNLWQHWENQVGHRKIRPHNIATGDYPPRPQKQYPINPKAKPSIQIVIDDLLKQGVLTPQNSTMNTPVYPVPKPDGRWRMVLDYREVNKTIPLTAAQNQHSAGILATIVRQKYKTTLDLANGFWAHPITPESYWLTAFTWQGKQYCWTRLPQGFLNSPALFTADVVDLLKEIPNVQVYVDDIYLSHDDPKEHVQQLEKVFQILLQAGYVVSLKKSEIGQKTVEFLGFNITKEGRGLTDTFKTKLLNITPPKDLKQLQSILGLLNFARNFIPNFAELVQPLYNLIASAKGKYIEWSEENTKQLNMVIEALNTASNLEERLPEQRLVIKVNTSPSAGYVRYYNETGKKPIMYLNYVFSKAELKFSMLEKLLTTMHKALIKAMDLAMGQEILVYSPIVSMTKIQKTPLPERKALPIRWITWMTYLEDPRIQFHYDKTLPELKHIPDVYTSSQSPVKHPSQYEGVFYTDGSAIKSPDPTKSNNAGMGIVHATYKPEYQVLNQWSIPLGNHTAQMAEIAAVEFACKKALKIPGPVLVITDSFYVAESANKELPYWKSNGFVNNKKKPLKHISKWKSIAECLSMKPDITIQHEKGISLQIPVFILKGNALADKLATQGSYVVNAGKRTADGSEFEKRTADGSEFESPKKKAKVE

SEQ ID NO: 6913 - protein, 2176 aa, synthetic construct
MPAAKRVKLDGGDKKYSIGLDIGTNSVGWAVITDEYKVPSKKFKVLGNTDRHSIKKNLIGALLFDSGETAEATRLKRTARRRYTRRKNRICYLQEIFSNEMAKVDDSFFHRLEESFLVEEDKKHERHPIFGNIVDEVAYHEKYPTIYHLRKKLVDSTDKADLRLIYLALAHMIKFRGHFLIEGDLNPDNSDVDKLFIQLVQTYNQLFEENPINASGVDAKAILSARLSKSRRLENLIAQLPGEKKNGLFGNLIALSLGLTPNFKSNFDLAEDAKLQLSKDTYDDDLDNLLAQIGDQYADLFLAAKNLSDAILLSDILRVNTEITKAPLSASMIKRYDEHHQDLTLLKALVRQQLPEKYKEIFFDQSKNGYAGYIDGGASQEEFYKFIKPILEKMDGTEELLVKLNREDLLRKQRTFDNGSIPHQIHLGELHAILRRQEDFYPFLKDNREKIEKILTFRIPYYVGPLARGNSRFAWMTRKSEETITPWNFEEVVDKGASAQSFIERMTNFDKNLPNEKVLPKHSLLYEYFTVYNELTKVKYVTEGMRKPAFLSGEQKKAIVDLLFKTNRKVTVKQLKEDYFKKIECFDSVEISGVEDRFNASLGTYHDLLKIIKDKDFLDNEENEDILEDIVLTLTLFEDREMIEERLKTYAHLFDDKVMKQLKRRRYTGWGRLSRKLINGIRDKQSGKTILDFLKSDGFANRNFMQLIHDDSLTFKEDIQKAQVSGQGDSLHEHIANLAGSPAIKKGILQTVKVVDELVKVMGRHKPENIVIEMARENQTTQKGQKNSRERMKRIEEGIKELGSQILKEHPVENTQLQNEKLYLYYLQNGRDMYVDQELDINRLSDYDVDHIVPQSFLKDDSIDNKVLTRSDKARGKSDNVPSEEVVKKMKNYWRQLLNAKLITQRKFDNLTKAERGGLSELDKAGFIKRQLVETRQITKHVAQILDSRMNTKYDENDKLIREVKVITLKSKLVSDFRKDFQFYKVREINNYHHAHDAYLNAVVGTALIKKYPKLESEFVYGDYKVYDVRKMIAKSEQEIGKATAKYFFYSNIMNFFKTEITLANGEIRKRPLIETNGETGEIVWDKGRDFATVRKVLSMPQVNIVKKTEVQTGGFSKESILPKRNSDKLIARKKDWDPKKYGGFDSPTVAYSVLVVAKVEKGKSKKLKSVKELLGITIMERSSFEKNPIDFLEAKGYKEVKKDLIIKLPKYSLFELENGRKRMLASAGELQKGNELALPSKYVNFLYLASHYEKLKGSPEDNEQKQLFVEQHKHYLDEIIEQISEFSKRVILADANLDKVLSAYNKHRDKPIREQAENIIHLFTLTNLGAPAAFKYFDTTIDRKRYTSTKEVLDATLIHQSITGLYETRIDLSQLGGDGGGGGGGSEAAAKGGMNPLQLLQPLPAEIKGTKLLAHWNSGATITCIPESFLEDEQPIKKTLIKTIHGEKQQNVYYVTFKVKGRKVEAEVIASPYEYILLSPTDVPWLTQQPLQLTILVPLQEYQEKILSKTALPEDQKQQLKTLFVKYDNLWQHWENQVGHRKIRPHNIATGDYPPRPQKQYPINPKAKPSIQIVIDDLLKQGVLTPQNSTMNTPVYPVPKPDGRWRMVLDYREVNKTIPLTAAQNQHSAGILATIVRQKYKTTLDLANGFWAHPITPESYWLTAFTWQGKQYCWTRLPQGFLNSPALFNADVVDLLKEIPNVQVYVDDIYLSHDDPKEHVQQLEKVFQILLQAGYVVSLKKSEIGQKTVEFLGFNITKEGRGLTDTFKTKLLNITPPKDLKQLQSILGKLNFARNFIPNFAELVQPLYNLIAPAKGKYIEWSEENTKQLNMVIEALNTASNLEERLPEQRLVIKVNTSPSAGYVRYYNETGKKPIMYLNYVFSKAELKFSMLEKLLTTMHKALIKAMDLAMGQEILVYSPIVSMTKIQKTPLPERKALPIRWITWMTYLEDPRIQFHYDKTLPELKHIPDVYTSSQSPVKHPSQYEGVFYTDGSAIKSPDPTKSNNAGMGIVHATYKPEYQVLNQWSIPLGNHTAQMAEIAAVEFACKKALKIPGPVLVITDSFYVAESANKELPYWKSNGFVNNKKKPLKHISKWKSIAECLSMKPDITIQHEKGISLQIPVFILKGNALADKLATQGSYVVNAGKRTADGSEFEKRTADGSEFESPKKKAKVE

SEQ ID NO: 6914 - protein, 2218 aa, synthetic construct
MPAAKRVKLDGGDKKYSIGLDIGTNSVGWAVITDEYKVPSKKFKVLGNTDRHSIKKNLIGALLFDSGETAEATRLKRTARRRYTRRKNRICYLQEIFSNEMAKVDDSFFHRLEESFLVEEDKKHERHPIFGNIVDEVAYHEKYPTIYHLRKKLVDSTDKADLRLIYLALAHMIKFRGHFLIEGDLNPDNSDVDKLFIQLVQTYNQLFEENPINASGVDAKAILSARLSKSRRLENLIAQLPGEKKNGLFGNLIALSLGLTPNFKSNFDLAEDAKLQLSKDTYDDDLDNLLAQIGDQYADLFLAAKNLSDAILLSDILRVNTEITKAPLSASMIKRYDEHHQDLTLLKALVRQQLPEKYKEIFFDQSKNGYAGYIDGGASQEEFYKFIKPILEKMDGTEELLVKLNREDLLRKQRTFDNGSIPHQIHLGELHAILRRQEDFYPFLKDNREKIEKILTFRIPYYVGPLARGNSRFAWMTRKSEETITPWNFEEVVDKGASAQSFIERMTNFDKNLPNEKVLPKHSLLYEYFTVYNELTKVKYVTEGMRKPAFLSGEQKKAIVDLLFKTNRKVTVKQLKEDYFKKIECFDSVEISGVEDRFNASLGTYHDLLKIIKDKDFLDNEENEDILEDIVLTLTLFEDREMIEERLKTYAHLFDDKVMKQLKRRRYTGWGRLSRKLINGIRDKQSGKTILDFLKSDGFANRNFMQLIHDDSLTFKEDIQKAQVSGQGDSLHEHIANLAGSPAIKKGILQTVKVVDELVKVMGRHKPENIVIEMARENQTTQKGQKNSRERMKRIEEGIKELGSQILKEHPVENTQLQNEKLYLYYLQNGRDMYVDQELDINRLSDYDVDHIVPQSFLKDDSIDNKVLTRSDKARGKSDNVPSEEVVKKMKNYWRQLLNAKLITQRKFDNLTKAERGGLSELDKAGFIKRQLVETRQITKHVAQILDSRMNTKYDENDKLIREVKVITLKSKLVSDFRKDFQFYKVREINNYHHAHDAYLNAVVGTALIKKYPKLESEFVYGDYKVYDVRKMIAKSEQEIGKATAKYFFYSNIMNFFKTEITLANGEIRKRPLIETNGETGEIVWDKGRDFATVRKVLSMPQVNIVKKTEVQTGGFSKESILPKRNSDKLIARKKDWDPKKYGGFDSPTVAYSVLVVAKVEKGKSKKLKSVKELLGITIMERSSFEKNPIDFLEAKGYKEVKKDLIIKLPKYSLFELENGRKRMLASAGELQKGNELALPSKYVNFLYLASHYEKLKGSPEDNEQKQLFVEQHKHYLDEIIEQISEFSKRVILADANLDKVLSAYNKHRDKPIREQAENIIHLFTLTNLGAPAAFKYFDTTIDRKRYTSTKEVLDATLIHQSITGLYETRIDLSQLGGDGGGGGGGSEAAAKGGTLGDQGSRGSDPLPEPRVTLTVEGIPTEFLVNTGAEHSVLTKPMGKMGSKRTVVAGATGSKVYPWTTKRLLKIGQKQVTHSFLVIPECPAPLLGRDLLTKLKAQIQFSTEGPQVTWEDRPAMCLVLNLEEEYRLHEKPVPPSIDPSWLQLFPMVWAEKAGMGLANQVPPVVVELKSDASPVAVRQYPMSKEAREGIRPHIQRFLDLGILVPCQSPWNTPLLPVKKPGTNDYRPVQDLREVNKRVQDIHPTVPNPYNLLSSLPPSHTWYSVLDLKDAFFCLKLHPNSQPLFAFEWRDPEKGNTGQLTWTRLPQGFKNSPTLFDEALHRDLASFRALNPQVVMLQYVDDLLVAAPTYRDCKEGTRRLLQELSKLGYRVSAKKAQLCREEVTYLGYLLKGGKRWLTPARKATVMKIPTPTTPRQVREFLGTAGFCRLWIPGFASLAAPLYPLTREKVPFTWTEAHQEAFGRIKEALLSAPALALPDLTKPFALYVDEKEGVARGVLTQTLGPWRRPVAYLSKKLDPVASGWPTCLKAIAAVALLLKDADKLTLGQNVLVIAPHNLESIVRQPPDRWMTNARMTHYQSLLLNERVSFAPPAILNPATLLPVESDDTPIHICSEILAEETGTRPDLRDQPLPGVPAWYTDGSSFIMDGRRQAGAAIVDNKRTVWASNLPEGTSAQKAELIALTQALRLAEGKSINIYTDSRYAFATAHVHGAIYKQRGLLTSAGKDIKNKEEILALLEAIHLPKRVAIIHCPGHQRGTDPVATGNRKADEAAKQAAQSTRILTETTKNAGKRTADGSEFEKRTADGSEFESPKKKAKVE

SEQ ID NO: 6915 - protein, 2127 aa, synthetic construct
MPAAKRVKLDGGDKKYSIGLDIGTNSVGWAVITDEYKVPSKKFKVLGNTDRHSIKKNLIGALLFDSGETAEATRLKRTARRRYTRRKNRICYLQEIFSNEMAKVDDSFFHRLEESFLVEEDKKHERHPIFGNIVDEVAYHEKYPTIYHLRKKLVDSTDKADLRLIYLALAHMIKFRGHFLIEGDLNPDNSDVDKLFIQLVQTYNQLFEENPINASGVDAKAILSARLSKSRRLENLIAQLPGEKKNGLFGNLIALSLGLTPNFKSNFDLAEDAKLQLSKDTYDDDLDNLLAQIGDQYADLFLAAKNLSDAILLSDILRVNTEITKAPLSASMIKRYDEHHQDLTLLKALVRQQLPEKYKEIFFDQSKNGYAGYIDGGASQEEFYKFIKPILEKMDGTEELLVKLNREDLLRKQRTFDNGSIPHQIHLGELHAILRRQEDFYPFLKDNREKIEKILTFRIPYYVGPLARGNSRFAWMTRKSEETITPWNFEEVVDKGASAQSFIERMTNFDKNLPNEKVLPKHSLLYEYFTVYNELTKVKYVTEGMRKPAFLSGEQKKAIVDLLFKTNRKVTVKQLKEDYFKKIECFDSVEISGVEDRFNASLGTYHDLLKIIKDKDFLDNEENEDILEDIVLTLTLFEDREMIEERLKTYAHLFDDKVMKQLKRRRYTGWGRLSRKLINGIRDKQSGKTILDFLKSDGFANRNFMQLIHDDSLTFKEDIQKAQVSGQGDSLHEHIANLAGSPAIKKGILQTVKVVDELVKVMGRHKPENIVIEMARENQTTQKGQKNSRERMKRIEEGIKELGSQILKEHPVENTQLQNEKLYLYYLQNGRDMYVDQELDINRLSDYDVDHIVPQSFLKDDSIDNKVLTRSDKARGKSDNVPSEEVVKKMKNYWRQLLNAKLITQRKFDNLTKAERGGLSELDKAGFIKRQLVETRQITKHVAQILDSRMNTKYDENDKLIREVKVITLKSKLVSDFRKDFQFYKVREINNYHHAHDAYLNAVVGTALIKKYPKLESEFVYGDYKVYDVRKMIAKSEQEIGKATAKYFFYSNIMNFFKTEITLANGEIRKRPLIETNGETGEIVWDKGRDFATVRKVLSMPQVNIVKKTEVQTGGFSKESILPKRNSDKLIARKKDWDPKKYGGFDSPTVAYSVLVVAKVEKGKSKKLKSVKELLGITIMERSSFEKNPIDFLEAKGYKEVKKDLIIKLPKYSLFELENGRKRMLASAGELQKGNELALPSKYVNFLYLASHYEKLKGSPEDNEQKQLFVEQHKHYLDEIIEQISEFSKRVILADANLDKVLSAYNKHRDKPIREQAENIIHLFTLTNLGAPAAFKYFDTTIDRKRYTSTKEVLDATLIHQSITGLYETRIDLSQLGGDGGGGGGGSEAAAKGGLLGRDLLTKLKAQIQFSTEGPQVTWEDRPAMCLVLNLEEEYRLHEKPVPPSIDPSWLQLFPMVWAEKAGMGLANQVPPVVVELKSDASPVAVRQYPMSKEAREGIRPHIQRFLDLGILVPCQSPWNTPLLPVKKPGTNDYRPVQDLREVNKRVQDIHPTVPNPYNLLSSLPPSHTWYSVLDLKDAFFCLKLHPNSQPLFAFEWRDPEKGNTGQLTWTRLPQGFKNSPTLFNEALHRDLASFRALNPQVVMLQYVDDLLVAAPTYRDCKEGTRRLLQELSKLGYRVSAKKAQLCREEVTYLGYLLKGGKRWLTPARKATVMKIPTPTTPRQVREFLGTAGFCRLWIPGFASLAAPLYPLTRPKVPFTWTEAHQEAFGRIKEALLSAPALALPDLTKPFALYVDEKEGVARGVLTQTLGPWRRPVAYLSKKLDPVASGWPTCLKAIAAVALLLKDADKLTLGQNVLVIAPHNLESIVRQPPDRWMTNARMTHYQSLLLNERVSFAPPAILNPATLLPVESDDTPIHICSEILAEETGTRPDLRDQPLPGVPAWYTDGSSFIMDGRRQAGAAIVDNKRTVWASNLPEGTSAQKAELIALTQALRLAEGKSINIYTDSRYAFATAHVHGAIYKQRGWLTSAGKDIKNKEEILALLEAIHLPKRVAIIHCPGHQRGTDPVATGNRKADEAAKQAAQSTRILTETTKNAGKRTADGSEFEKRTADGSEFESPKKKAKVE

SEQ ID NO: 6916 - protein, 2218 aa, synthetic construct
MPAAKRVKLDGGDKKYSIGLDIGTNSVGWAVITDEYKVPSKKFKVLGNTDRHSIKKNLIGALLFDSGETAEATRLKRTARRRYTRRKNRICYLQEIFSNEMAKVDDSFFHRLEESFLVEEDKKHERHPIFGNIVDEVAYHEKYPTIYHLRKKLVDSTDKADLRLIYLALAHMIKFRGHFLIEGDLNPDNSDVDKLFIQLVQTYNQLFEENPINASGVDAKAILSARLSKSRRLENLIAQLPGEKKNGLFGNLIALSLGLTPNFKSNFDLAEDAKLQLSKDTYDDDLDNLLAQIGDQYADLFLAAKNLSDAILLSDILRVNTEITKAPLSASMIKRYDEHHQDLTLLKALVRQQLPEKYKEIFFDQSKNGYAGYIDGGASQEEFYKFIKPILEKMDGTEELLVKLNREDLLRKQRTFDNGSIPHQIHLGELHAILRRQEDFYPFLKDNREKIEKILTFRIPYYVGPLARGNSRFAWMTRKSEETITPWNFEEVVDKGASAQSFIERMTNFDKNLPNEKVLPKHSLLYEYFTVYNELTKVKYVTEGMRKPAFLSGEQKKAIVDLLFKTNRKVTVKQLKEDYFKKIECFDSVEISGVEDRFNASLGTYHDLLKIIKDKDFLDNEENEDILEDIVLTLTLFEDREMIEERLKTYAHLFDDKVMKQLKRRRYTGWGRLSRKLINGIRDKQSGKTILDFLKSDGFANRNFMQLIHDDSLTFKEDIQKAQVSGQGDSLHEHIANLAGSPAIKKGILQTVKVVDELVKVMGRHKPENIVIEMARENQTTQKGQKNSRERMKRIEEGIKELGSQILKEHPVENTQLQNEKLYLYYLQNGRDMYVDQELDINRLSDYDVDHIVPQSFLKDDSIDNKVLTRSDKARGKSDNVPSEEVVKKMKNYWRQLLNAKLITQRKFDNLTKAERGGLSELDKAGFIKRQLVETRQITKHVAQILDSRMNTKYDENDKLIREVKVITLKSKLVSDFRKDFQFYKVREINNYHHAHDAYLNAVVGTALIKKYPKLESEFVYGDYKVYDVRKMIAKSEQEIGKATAKYFFYSNIMNFFKTEITLANGEIRKRPLIETNGETGEIVWDKGRDFATVRKVLSMPQVNIVKKTEVQTGGFSKESILPKRNSDKLIARKKDWDPKKYGGFDSPTVAYSVLVVAKVEKGKSKKLKSVKELLGITIMERSSFEKNPIDFLEAKGYKEVKKDLIIKLPKYSLFELENGRKRMLASAGELQKGNELALPSKYVNFLYLASHYEKLKGSPEDNEQKQLFVEQHKHYLDEIIEQISEFSKRVILADANLDKVLSAYNKHRDKPIREQAENIIHLFTLTNLGAPAAFKYFDTTIDRKRYTSTKEVLDATLIHQSITGLYETRIDLSQLGGDGGGGGGGSEAAAKGGTLGDQGSRGSDPLPEPRVTLTVEGIPTEFLVNTGAEHSVLTKPMGKMGSKRTVVAGATGSKVYPWTTKRLLKIGQKQVTHSFLVIPECPAPLLGRDLLTKLKAQIQFSTEGPQVTWEDRPAMCLVLNLEEEYRLHEKPVPPSIDPSWLQLFPMVWAEKAGMGLANQVPPVVVELKSDASPVAVRQYPMSKEAREGIRPHIQRFLDLGILVPCQSPWNTPLLPVKKPGTNDYRPVQDLREVNKRVQDIHPTVPNPYNLLSSLPPSHTWYSVLDLKDAFFCLKLHPNSQPLFAFEWRDPEKGNTGQLTWTRLPQGFKNSPTLFNEALHRDLASFRALNPQVVMLQYVDDLLVAAPTYRDCKEGTRRLLQELSKLGYRVSAKKAQLCREEVTYLGYLLKGGKRWLTPARKATVMKIPTPTTPRQVREFLGTAGFCRLWIPGFASLAAPLYPLTRPKVPFTWTEAHQEAFGRIKEALLSAPALALPDLTKPFALYVDEKEGVARGVLTQTLGPWRRPVAYLSKKLDPVASGWPTCLKAIAAVALLLKDADKLTLGQNVLVIAPHNLESIVRQPPDRWMTNARMTHYQSLLLNERVSFAPPAILNPATLLPVESDDTPIHICSEILAEETGTRPDLRDQPLPGVPAWYTDGSSFIMDGRRQAGAAIVDNKRTVWASNLPEGTSAQKAELIALTQALRLAEGKSINIYTDSRYAFATAHVHGAIYKQRGWLTSAGKDIKNKEEILALLEAIHLPKRVAIIHCPGHQRGTDPVATGNRKADEAAKQAAQSTRILTETTKNAGKRTADGSEFEKRTADGSEFESPKKKAKVE

SEQ ID NO: 6917 - protein, 2096 aa, synthetic construct
MPAAKRVKLDGGDKKYSIGLDIGTNSVGWAVITDEYKVPSKKFKVLGNTDRHSIKKNLIGALLFDSGETAEATRLKRTARRRYTRRKNRICYLQEIFSNEMAKVDDSFFHRLEESFLVEEDKKHERHPIFGNIVDEVAYHEKYPTIYHLRKKLVDSTDKADLRLIYLALAHMIKFRGHFLIEGDLNPDNSDVDKLFIQLVQTYNQLFEENPINASGVDAKAILSARLSKSRRLENLIAQLPGEKKNGLFGNLIALSLGLTPNFKSNFDLAEDAKLQLSKDTYDDDLDNLLAQIGDQYADLFLAAKNLSDAILLSDILRVNTEITKAPLSASMIKRYDEHHQDLTLLKALVRQQLPEKYKEIFFDQSKNGYAGYIDGGASQEEFYKFIKPILEKMDGTEELLVKLNREDLLRKQRTFDNGSIPHQIHLGELHAILRRQEDFYPFLKDNREKIEKILTFRIPYYVGPLARGNSRFAWMTRKSEETITPWNFEEVVDKGASAQSFIERMTNFDKNLPNEKVLPKHSLLYEYFTVYNELTKVKYVTEGMRKPAFLSGEQKKAIVDLLFKTNRKVTVKQLKEDYFKKIECFDSVEISGVEDRFNASLGTYHDLLKIIKDKDFLDNEENEDILEDIVLTLTLFEDREMIEERLKTYAHLFDDKVMKQLKRRRYTGWGRLSRKLINGIRDKQSGKTILDFLKSDGFANRNFMQLIHDDSLTFKEDIQKAQVSGQGDSLHEHIANLAGSPAIKKGILQTVKVVDELVKVMGRHKPENIVIEMARENQTTQKGQKNSRERMKRIEEGIKELGSQILKEHPVENTQLQNEKLYLYYLQNGRDMYVDQELDINRLSDYDVDHIVPQSFLKDDSIDNKVLTRSDKARGKSDNVPSEEVVKKMKNYWRQLLNAKLITQRKFDNLTKAERGGLSELDKAGFIKRQLVETRQITKHVAQILDSRMNTKYDENDKLIREVKVITLKSKLVSDFRKDFQFYKVREINNYHHAHDAYLNAVVGTALIKKYPKLESEFVYGDYKVYDVRKMIAKSEQEIGKATAKYFFYSNIMNFFKTEITLANGEIRKRPLIETNGETGEIVWDKGRDFATVRKVLSMPQVNIVKKTEVQTGGFSKESILPKRNSDKLIARKKDWDPKKYGGFDSPTVAYSVLVVAKVEKGKSKKLKSVKELLGITIMERSSFEKNPIDFLEAKGYKEVKKDLIIKLPKYSLFELENGRKRMLASAGELQKGNELALPSKYVNFLYLASHYEKLKGSPEDNEQKQLFVEQHKHYLDEIIEQISEFSKRVILADANLDKVLSAYNKHRDKPIREQAENIIHLFTLTNLGAPAAFKYFDTTIDRKRYTSTKEVLDATLIHQSITGLYETRIDLSQLGGDGGGGGGGSEAAAKGGTLNLEDEYRLYETSAEPEVSPGSTWLSDFPQAWAETGGMGLAVRQAPLIIPLKATSTPVSIKQYPMSQEAKLGIKPHIQRLLDQGILVPCQSPWNTPLLPVKKPGTNDYRPVQDLREVNKRVEDIHPTVPNPYNLLSGLPPSHRWYTVLDLKDAFFCLRLHPTSQPLFAFEWRDPGMGISGQLTWTRLPQGFKNSPTLFNEALHRDLADFRIQHPDLILLQYVDDILLAATSELDCQQGTRALLLTLGNLGYRASAKKAQLCQKQVKYLGYLLKEGQRWLTEARKETVMGQPTPKTPRQLREFLGTAGFCRLWIPGFAEMAAPLYPLTKPGTLFNWGPDQQKAYQEIKQALLTAPALGLPDLTKPFELFVDEKQGYAKGVLTQKLGPWRRPVAYLSKKLDPVAAGWPPCLRMVAAIAVLRKDAGKLTMGQPLVILAPHAVEALVKQPPDRWLSNARMTHYQAMLLDTDRVQFGPVVALNPATLLPLPEEGAPHDCLEILAETHGTRPDLTDQPIPDADHTWYTDGSSFLQEGQRKAGAAVTTETEVIWARALPAGTSAQRAELIALTQALKMAEGKRLNVYTDSRYAFATAHIHGEIYRRRGWLTSEGREIKNKSEILALLKALFLPKRLSIIHCLGHQKGDSAEARGNRLADQAAREAAIKTPPDTSTLLAGKRTADGSEFEKRTADGSEFESPKKKAKVE

SEQ ID NO: 6918 - protein, 2096 aa, synthetic construct
MPAAKRVKLDGGDKKYSIGLDIGTNSVGWAVITDEYKVPSKKFKVLGNTDRHSIKKNLIGALLFDSGETAEATRLKRTARRRYTRRKNRICYLQEIFSNEMAKVDDSFFHRLEESFLVEEDKKHERHPIFGNIVDEVAYHEKYPTIYHLRKKLVDSTDKADLRLIYLALAHMIKFRGHFLIEGDLNPDNSDVDKLFIQLVQTYNQLFEENPINASGVDAKAILSARLSKSRRLENLIAQLPGEKKNGLFGNLIALSLGLTPNFKSNFDLAEDAKLQLSKDTYDDDLDNLLAQIGDQYADLFLAAKNLSDAILLSDILRVNTEITKAPLSASMIKRYDEHHQDLTLLKALVRQQLPEKYKEIFFDQSKNGYAGYIDGGASQEEFYKFIKPILEKMDGTEELLVKLNREDLLRKQRTFDNGSIPHQIHLGELHAILRRQEDFYPFLKDNREKIEKILTFRIPYYVGPLARGNSRFAWMTRKSEETITPWNFEEVVDKGASAQSFIERMTNFDKNLPNEKVLPKHSLLYEYFTVYNELTKVKYVTEGMRKPAFLSGEQKKAIVDLLFKTNRKVTVKQLKEDYFKKIECFDSVEISGVEDRFNASLGTYHDLLKIIKDKDFLDNEENEDILEDIVLTLTLFEDREMIEERLKTYAHLFDDKVMKQLKRRRYTGWGRLSRKLINGIRDKQSGKTILDFLKSDGFANRNFMQLIHDDSLTFKEDIQKAQVSGQGDSLHEHIANLAGSPAIKKGILQTVKVVDELVKVMGRHKPENIVIEMARENQTTQKGQKNSRERMKRIEEGIKELGSQILKEHPVENTQLQNEKLYLYYLQNGRDMYVDQELDINRLSDYDVDHIVPQSFLKDDSIDNKVLTRSDKARGKSDNVPSEEVVKKMKNYWRQLLNAKLITQRKFDNLTKAERGGLSELDKAGFIKRQLVETRQITKHVAQILDSRMNTKYDENDKLIREVKVITLKSKLVSDFRKDFQFYKVREINNYHHAHDAYLNAVVGTALIKKYPKLESEFVYGDYKVYDVRKMIAKSEQEIGKATAKYFFYSNIMNFFKTEITLANGEIRKRPLIETNGETGEIVWDKGRDFATVRKVLSMPQVNIVKKTEVQTGGFSKESILPKRNSDKLIARKKDWDPKKYGGFDSPTVAYSVLVVAKVEKGKSKKLKSVKELLGITIMERSSFEKNPIDFLEAKGYKEVKKDLIIKLPKYSLFELENGRKRMLASAGELQKGNELALPSKYVNFLYLASHYEKLKGSPEDNEQKQLFVEQHKHYLDEIIEQISEFSKRVILADANLDKVLSAYNKHRDKPIREQAENIIHLFTLTNLGAPAAFKYFDTTIDRKRYTSTKEVLDATLIHQSITGLYETRIDLSQLGGDGGGGGGGSEAAAKGGTLNIEDEYRLHETSKGPDVPLGSTWLSDFPQAWAETGGMGLAFRQAPLIISLKATSTPVSIKQYPMSQEARLGIKPHIQRLLDQGILVPCQSPWNTPLLPVKKPGTNDYRPVQDLREVNKRVEDIHPTVPNPYNLLSGLPPSHQWYTVLDLKDAFFCLRLHPTSQSLFAFEWKDPEMGISGQLTWTRLPQGFKNSPTLFDEALHRDLADFRIQHPDLILLQYVDDLLLAATSELDCQQGTRALLQTLGDLGYRASAKKAQICQKQVKYLGYLLKEGQRWLTEARKETVMGQPTPKTPRQLREFLGTAGLCRLWIPGFAEMAAPLYPLTKTGTLFKWGPDQQKAYQEIKQALLTAPALGLPDLTKPFELFVDEKQGYAKGVLTQKLGPWRRPVAYLSKKLDPVAAGWPPCLRMVAAIAVLTKDVGKLTMGQPLVILAPHAVEALVKQPPDRWLSNARMTHYQALLLDTDRVQFGPIVALNPATLLPLPEEGLQHDCLDILAEAHGTRPDLTDQPLPDADHTWYTDGSSFLQEGQRRAGAAVTTETEVIWAKALPAGTSAQRAELIALTQALKMAAGKKLNVYTDSRYAFATAHIHGEIYRRRGLLTSEGKEIKNKDEILALLKALFLPKRLSIIHCPGHQKGNHAEARGNRMADQAAREVATRETPETSTLLAGKRTADGSEFEKRTADGSEFESPKKKAKVE

SEQ ID NO: 6919 - protein, 2096 aa, synthetic construct
MPAAKRVKLDGGDKKYSIGLDIGTNSVGWAVITDEYKVPSKKFKVLGNTDRHSIKKNLIGALLFDSGETAEATRLKRTARRRYTRRKNRICYLQEIFSNEMAKVDDSFFHRLEESFLVEEDKKHERHPIFGNIVDEVAYHEKYPTIYHLRKKLVDSTDKADLRLIYLALAHMIKFRGHFLIEGDLNPDNSDVDKLFIQLVQTYNQLFEENPINASGVDAKAILSARLSKSRRLENLIAQLPGEKKNGLFGNLIALSLGLTPNFKSNFDLAEDAKLQLSKDTYDDDLDNLLAQIGDQYADLFLAAKNLSDAILLSDILRVNTEITKAPLSASMIKRYDEHHQDLTLLKALVRQQLPEKYKEIFFDQSKNGYAGYIDGGASQEEFYKFIKPILEKMDGTEELLVKLNREDLLRKQRTFDNGSIPHQIHLGELHAILRRQEDFYPFLKDNREKIEKILTFRIPYYVGPLARGNSRFAWMTRKSEETITPWNFEEVVDKGASAQSFIERMTNFDKNLPNEKVLPKHSLLYEYFTVYNELTKVKYVTEGMRKPAFLSGEQKKAIVDLLFKTNRKVTVKQLKEDYFKKIECFDSVEISGVEDRFNASLGTYHDLLKIIKDKDFLDNEENEDILEDIVLTLTLFEDREMIEERLKTYAHLFDDKVMKQLKRRRYTGWGRLSRKLINGIRDKQSGKTILDFLKSDGFANRNFMQLIHDDSLTFKEDIQKAQVSGQGDSLHEHIANLAGSPAIKKGILQTVKVVDELVKVMGRHKPENIVIEMARENQTTQKGQKNSRERMKRIEEGIKELGSQILKEHPVENTQLQNEKLYLYYLQNGRDMYVDQELDINRLSDYDVDHIVPQSFLKDDSIDNKVLTRSDKARGKSDNVPSEEVVKKMKNYWRQLLNAKLITQRKFDNLTKAERGGLSELDKAGFIKRQLVETRQITKHVAQILDSRMNTKYDENDKLIREVKVITLKSKLVSDFRKDFQFYKVREINNYHHAHDAYLNAVVGTALIKKYPKLESEFVYGDYKVYDVRKMIAKSEQEIGKATAKYFFYSNIMNFFKTEITLANGEIRKRPLIETNGETGEIVWDKGRDFATVRKVLSMPQVNIVKKTEVQTGGFSKESILPKRNSDKLIARKKDWDPKKYGGFDSPTVAYSVLVVAKVEKGKSKKLKSVKELLGITIMERSSFEKNPIDFLEAKGYKEVKKDLIIKLPKYSLFELENGRKRMLASAGELQKGNELALPSKYVNFLYLASHYEKLKGSPEDNEQKQLFVEQHKHYLDEIIEQISEFSKRVILADANLDKVLSAYNKHRDKPIREQAENIIHLFTLTNLGAPAAFKYFDTTIDRKRYTSTKEVLDATLIHQSITGLYETRIDLSQLGGDGGGGGGGSEAAAKGGTLNIEDEYRLHETSKGPDVPLGSTWLSDFPQAWAETGGMGLAVRQAPLIIPLKATSTPVSIKQYPMSQEARLGIKPHIQRLLDQGILVPCQSPWNTPLLPVKKPGTNDYRPVQDLREVNKRVEDIHPTVPNPYNLLSGLPPSHQWYTVLDLKDAFFCLRLHPTSQSLFAFEWRDPEMGISGQLTWTRLPQGFKNSPTLFNEALHRDLADFRIQHPDLILLQYVDDLLLAATSELDCQQGTRALLQTLGDLGYRASAKKAQICQKQVKYLGYLLKEGQRWLTEARKETVMGQPTPKTPRQLREFLGTAGFCRLWIPGFAEMAAPLYPLTKPGTLFEWGPDQQKAYQEIKQALLTAPALGLPDLTKPFELFVDEKQGYAKGVLTQKLGPWRRPVAYLSKKLDPVAAGWPPCLRMVAAIAVLTKDAGKLTMGQPLVILAPHAVEALVKQPPDRWLSNARMTHYQALLLDTDRVQFGPIVALNPATLLPLPEEGLQHDCLDILAEAHGTRPDLTDQPLPDADHTWYTDGSSFLQEGQRKAGAAVTTETEVVWAKALPAGTSAQRAELIALTQALKMAEGKKLNVYTDSRYAFATAHIHGEIYRRRGWLTSEGKEIKNKDEILALLKALFLPKRLSIIHCPGHQKGNRAEARGNRMADQAAREVATRETPETSTLLAGKRTADGSEFEKRTADGSEFESPKKKAKVE

SEQ ID NO: 6920 - protein, 2090 aa, synthetic construct
MPAAKRVKLDGGDKKYSIGLDIGTNSVGWAVITDEYKVPSKKFKVLGNTDRHSIKKNLIGALLFDSGETAEATRLKRTARRRYTRRKNRICYLQEIFSNEMAKVDDSFFHRLEESFLVEEDKKHERHPIFGNIVDEVAYHEKYPTIYHLRKKLVDSTDKADLRLIYLALAHMIKFRGHFLIEGDLNPDNSDVDKLFIQLVQTYNQLFEENPINASGVDAKAILSARLSKSRRLENLIAQLPGEKKNGLFGNLIALSLGLTPNFKSNFDLAEDAKLQLSKDTYDDDLDNLLAQIGDQYADLFLAAKNLSDAILLSDILRVNTEITKAPLSASMIKRYDEHHQDLTLLKALVRQQLPEKYKEIFFDQSKNGYAGYIDGGASQEEFYKFIKPILEKMDGTEELLVKLNREDLLRKQRTFDNGSIPHQIHLGELHAILRRQEDFYPFLKDNREKIEKILTFRIPYYVGPLARGNSRFAWMTRKSEETITPWNFEEVVDKGASAQSFIERMTNFDKNLPNEKVLPKHSLLYEYFTVYNELTKVKYVTEGMRKPAFLSGEQKKAIVDLLFKTNRKVTVKQLKEDYFKKIECFDSVEISGVEDRFNASLGTYHDLLKIIKDKDFLDNEENEDILEDIVLTLTLFEDREMIEERLKTYAHLFDDKVMKQLKRRRYTGWGRLSRKLINGIRDKQSGKTILDFLKSDGFANRNFMQLIHDDSLTFKEDIQKAQVSGQGDSLHEHIANLAGSPAIKKGILQTVKVVDELVKVMGRHKPENIVIEMARENQTTQKGQKNSRERMKRIEEGIKELGSQILKEHPVENTQLQNEKLYLYYLQNGRDMYVDQELDINRLSDYDVDHIVPQSFLKDDSIDNKVLTRSDKARGKSDNVPSEEVVKKMKNYWRQLLNAKLITQRKFDNLTKAERGGLSELDKAGFIKRQLVETRQITKHVAQILDSRMNTKYDENDKLIREVKVITLKSKLVSDFRKDFQFYKVREINNYHHAHDAYLNAVVGTALIKKYPKLESEFVYGDYKVYDVRKMIAKSEQEIGKATAKYFFYSNIMNFFKTEITLANGEIRKRPLIETNGETGEIVWDKGRDFATVRKVLSMPQVNIVKKTEVQTGGFSKESILPKRNSDKLIARKKDWDPKKYGGFDSPTVAYSVLVVAKVEKGKSKKLKSVKELLGITIMERSSFEKNPIDFLEAKGYKEVKKDLIIKLPKYSLFELENGRKRMLASAGELQKGNELALPSKYVNFLYLASHYEKLKGSPEDNEQKQLFVEQHKHYLDEIIEQISEFSKRVILADANLDKVLSAYNKHRDKPIREQAENIIHLFTLTNLGAPAAFKYFDTTIDRKRYTSTKEVLDATLIHQSITGLYETRIDLSQLGGDGGGGGGGSEAAAKGGTLQLDDEYRLYSPLVKPDQNIQFWLEQFPQAWAETAGMGLAKQVPPQVIQLKASATPVSVRQYPLSKEAQEGIRPHVQRLIQQGILVPVQSPWNTPLLPVRKPGTNDYRPVQDLREVNKRVQDIHPTVPNPYNLLCALPPQRSWYTVLDLKDAFFCLRLHPTSQPLFAFEWRDPGTGRTGQLTWTRLPQGFKNSPTIFDEALHRDLANFRIQHPQVTLLQYVDDLLLAGATKQDCLEGTKALLLELSDLGYRASAKKAQICRREVTYLGYSLRDGQRWLTEARKKTVVQIPAPTTAKQVREFLGTAGFCRLWIPGFATLAAPLYPLTKEKGEFSWAPEHQKAFDAIKKALLSAPALALPDVTKPFTLYVDERKGVARGVLTQTLGPWRRPVAYLSKKLDPVASGWPVCLKAIAAVAILVKDADKLTLGQNITVIAPHALENIVRQPPDRWMTNARMTHYQSLLLTERVTFAPPAALNPATLLPEETDEPVTHDCHQLLIEETGVRKDLTDIPLTGEVLTWFTDGSSYVVEGKRMAGAAVVDGTRTIWASSLPEGTSAQKAELMALTQALRLAEGKSINIYTDSRYAFATAHVHGAIYKQRGLLTSAGREIKNKEEILSLLEALHLPKRLAIIHCPGHQKAKDPISRGNQMADRVAKQAAQGVNLLAGKRTADGSEFEKRTADGSEFESPKKKAKVE

SEQ ID NO: 6921 - protein, 2087 aa, synthetic construct
MPAAKRVKLDGGDKKYSIGLDIGTNSVGWAVITDEYKVPSKKFKVLGNTDRHSIKKNLIGALLFDSGETAEATRLKRTARRRYTRRKNRICYLQEIFSNEMAKVDDSFFHRLEESFLVEEDKKHERHPIFGNIVDEVAYHEKYPTIYHLRKKLVDSTDKADLRLIYLALAHMIKFRGHFLIEGDLNPDNSDVDKLFIQLVQTYNQLFEENPINASGVDAKAILSARLSKSRRLENLIAQLPGEKKNGLFGNLIALSLGLTPNFKSNFDLAEDAKLQLSKDTYDDDLDNLLAQIGDQYADLFLAAKNLSDAILLSDILRVNTEITKAPLSASMIKRYDEHHQDLTLLKALVRQQLPEKYKEIFFDQSKNGYAGYIDGGASQEEFYKFIKPILEKMDGTEELLVKLNREDLLRKQRTFDNGSIPHQIHLGELHAILRRQEDFYPFLKDNREKIEKILTFRIPYYVGPLARGNSRFAWMTRKSEETITPWNFEEVVDKGASAQSFIERMTNFDKNLPNEKVLPKHSLLYEYFTVYNELTKVKYVTEGMRKPAFLSGEQKKAIVDLLFKTNRKVTVKQLKEDYFKKIECFDSVEISGVEDRFNASLGTYHDLLKIIKDKDFLDNEENEDILEDIVLTLTLFEDREMIEERLKTYAHLFDDKVMKQLKRRRYTGWGRLSRKLINGIRDKQSGKTILDFLKSDGFANRNFMQLIHDDSLTFKEDIQKAQVSGQGDSLHEHIANLAGSPAIKKGILQTVKVVDELVKVMGRHKPENIVIEMARENQTTQKGQKNSRERMKRIEEGIKELGSQILKEHPVENTQLQNEKLYLYYLQNGRDMYVDQELDINRLSDYDVDHIVPQSFLKDDSIDNKVLTRSDKARGKSDNVPSEEVVKKMKNYWRQLLNAKLITQRKFDNLTKAERGGLSELDKAGFIKRQLVETRQITKHVAQILDSRMNTKYDENDKLIREVKVITLKSKLVSDFRKDFQFYKVREINNYHHAHDAYLNAVVGTALIKKYPKLESEFVYGDYKVYDVRKMIAKSEQEIGKATAKYFFYSNIMNFFKTEITLANGEIRKRPLIETNGETGEIVWDKGRDFATVRKVLSMPQVNIVKKTEVQTGGFSKESILPKRNSDKLIARKKDWDPKKYGGFDSPTVAYSVLVVAKVEKGKSKKLKSVKELLGITIMERSSFEKNPIDFLEAKGYKEVKKDLIIKLPKYSLFELENGRKRMLASAGELQKGNELALPSKYVNFLYLASHYEKLKGSPEDNEQKQLFVEQHKHYLDEIIEQISEFSKRVILADANLDKVLSAYNKHRDKPIREQAENIIHLFTLTNLGAPAAFKYFDTTIDRKRYTSTKEVLDATLIHQSITGLYETRIDLSQLGGDGGGGGGGSEAAAKGGVPWLMKKPLQLTVLVPLHEYQERLLQQTALPKEQKELLQKLFLKYDALWQHWENQVGHRRIKPHNIATGTLAPRPQKQYPINPKAKPSIQIVIDDLLKQGVLIQQNSTMNTPVYPVPKPDGKWRMVLDYREVNKTIPLIAAQNQHSAGILSSIYRGKYKTTLDLTNGFWAHPITPESYWLTAFTWQGKQYCWTRLPQGFLNSPALFTADVVDLLKEIPNVQAYVDDIYISHDDPQEHLEQLEKIFSILLNAGYVVSLKKSEIAQREVEFLGFNITKEGRGLTDTFKQKLLNITPPKDLKQLQSILGLLNFARNFIPNYSELVKPLYTIVANANGKFISWTEDNSNQLQHIISVLNQADNLEERNPETRLIIKVNSSPSAGYIRYYNEGSKRPIMYVNYIFSKAEAKFTQTEKLLTTMHKGLIKAMDLAMGQEILVYSPIVSMTKIQRTPLPERKALPVRWITWMTYLEDPRIQFHYDKSLPELQQIPNVTEDVIAKTKHPSEFAMVFYTDGSAIKHPDVNKSHSAGMGIAQVQFIPEYKIVHQWSIPLGDHTAQLAEIAAVEFACKKALKISGPVLIVTDSFYVAESANKELPYWKSNGFLNNKKKPLRHVSKWKSIAECLQLKPDIIIMHEKGHQQPMTTLHTEGNNLADKLATQGSYVVHAGKRTADGSEFEKRTADGSEFESPKKKAKVE

SEQ ID NO: 6922 - protein, 2087 aa, synthetic construct
MPAAKRVKLDGGDKKYSIGLDIGTNSVGWAVITDEYKVPSKKFKVLGNTDRHSIKKNLIGALLFDSGETAEATRLKRTARRRYTRRKNRICYLQEIFSNEMAKVDDSFFHRLEESFLVEEDKKHERHPIFGNIVDEVAYHEKYPTIYHLRKKLVDSTDKADLRLIYLALAHMIKFRGHFLIEGDLNPDNSDVDKLFIQLVQTYNQLFEENPINASGVDAKAILSARLSKSRRLENLIAQLPGEKKNGLFGNLIALSLGLTPNFKSNFDLAEDAKLQLSKDTYDDDLDNLLAQIGDQYADLFLAAKNLSDAILLSDILRVNTEITKAPLSASMIKRYDEHHQDLTLLKALVRQQLPEKYKEIFFDQSKNGYAGYIDGGASQEEFYKFIKPILEKMDGTEELLVKLNREDLLRKQRTFDNGSIPHQIHLGELHAILRRQEDFYPFLKDNREKIEKILTFRIPYYVGPLARGNSRFAWMTRKSEETITPWNFEEVVDKGASAQSFIERMTNFDKNLPNEKVLPKHSLLYEYFTVYNELTKVKYVTEGMRKPAFLSGEQKKAIVDLLFKTNRKVTVKQLKEDYFKKIECFDSVEISGVEDRFNASLGTYHDLLKIIKDKDFLDNEENEDILEDIVLTLTLFEDREMIEERLKTYAHLFDDKVMKQLKRRRYTGWGRLSRKLINGIRDKQSGKTILDFLKSDGFANRNFMQLIHDDSLTFKEDIQKAQVSGQGDSLHEHIANLAGSPAIKKGILQTVKVVDELVKVMGRHKPENIVIEMARENQTTQKGQKNSRERMKRIEEGIKELGSQILKEHPVENTQLQNEKLYLYYLQNGRDMYVDQELDINRLSDYDVDHIVPQSFLKDDSIDNKVLTRSDKARGKSDNVPSEEVVKKMKNYWRQLLNAKLITQRKFDNLTKAERGGLSELDKAGFIKRQLVETRQITKHVAQILDSRMNTKYDENDKLIREVKVITLKSKLVSDFRKDFQFYKVREINNYHHAHDAYLNAVVGTALIKKYPKLESEFVYGDYKVYDVRKMIAKSEQEIGKATAKYFFYSNIMNFFKTEITLANGEIRKRPLIETNGETGEIVWDKGRDFATVRKVLSMPQVNIVKKTEVQTGGFSKESILPKRNSDKLIARKKDWDPKKYGGFDSPTVAYSVLVVAKVEKGKSKKLKSVKELLGITIMERSSFEKNPIDFLEAKGYKEVKKDLIIKLPKYSLFELENGRKRMLASAGELQKGNELALPSKYVNFLYLASHYEKLKGSPEDNEQKQLFVEQHKHYLDEIIEQISEFSKRVILADANLDKVLSAYNKHRDKPIREQAENIIHLFTLTNLGAPAAFKYFDTTIDRKRYTSTKEVLDATLIHQSITGLYETRIDLSQLGGDGGGGGGGSEAAAKGGVPWLMKKPLQLTVLVPLHEYQERLLQQTALPKEQKELLQKLFLKYDALWQHWENQVGHRRIKPHNIATGTLAPRPQKQYPINPKAKPSIQIVIDDLLKQGVLIQQNSTMNTPVYPVPKPDGKWRMVLDYREVNKTIPLIAAQNQHSAGILSSIYRGKYKTTLDLTNGFWAHPITPESYWLTAFTWQGKQYCWTRLPQGFLNSPALFNADVVDLLKEIPNVQAYVDDIYISHDDPQEHLEQLEKIFSILLNAGYVVSLKKSEIAQREVEFLGFNITKEGRGLTDTFKQKLLNITPPKDLKQLQSILGLLNFARNFIPNYSELVKPLYTIVAPANGKFISWTEDNSNQLQHIISVLNQADNLEERNPETRLIIKVNSSPSAGYIRYYNEGSKRPIMYVNYIFSKAEAKFTQTEKLLTTMHKGLIKAMDLAMGQEILVYSPIVSMTKIQRTPLPERKALPVRWITWMTYLEDPRIQFHYDKSLPELQQIPNVTEDVIAKTKHPSEFAMVFYTDGSAIKHPDVNKSHSAGMGIAQVQFIPEYKIVHQWSIPLGDHTAQLAEIAAVEFACKKALKISGPVLIVTDSFYVAESANKELPYWKSNGFLNNKKKPLRHVSKWKSIAECLQLKPDIIIMHEKGHQQPMTTLHTEGNNLADKLATQGSYVVHAGKRTADGSEFEKRTADGSEFESPKKKAKVE

SEQ ID NO: 6923 - protein, 2087 aa, synthetic construct
MPAAKRVKLDGGDKKYSIGLDIGTNSVGWAVITDEYKVPSKKFKVLGNTDRHSIKKNLIGALLFDSGETAEATRLKRTARRRYTRRKNRICYLQEIFSNEMAKVDDSFFHRLEESFLVEEDKKHERHPIFGNIVDEVAYHEKYPTIYHLRKKLVDSTDKADLRLIYLALAHMIKFRGHFLIEGDLNPDNSDVDKLFIQLVQTYNQLFEENPINASGVDAKAILSARLSKSRRLENLIAQLPGEKKNGLFGNLIALSLGLTPNFKSNFDLAEDAKLQLSKDTYDDDLDNLLAQIGDQYADLFLAAKNLSDAILLSDILRVNTEITKAPLSASMIKRYDEHHQDLTLLKALVRQQLPEKYKEIFFDQSKNGYAGYIDGGASQEEFYKFIKPILEKMDGTEELLVKLNREDLLRKQRTFDNGSIPHQIHLGELHAILRRQEDFYPFLKDNREKIEKILTFRIPYYVGPLARGNSRFAWMTRKSEETITPWNFEEVVDKGASAQSFIERMTNFDKNLPNEKVLPKHSLLYEYFTVYNELTKVKYVTEGMRKPAFLSGEQKKAIVDLLFKTNRKVTVKQLKEDYFKKIECFDSVEISGVEDRFNASLGTYHDLLKIIKDKDFLDNEENEDILEDIVLTLTLFEDREMIEERLKTYAHLFDDKVMKQLKRRRYTGWGRLSRKLINGIRDKQSGKTILDFLKSDGFANRNFMQLIHDDSLTFKEDIQKAQVSGQGDSLHEHIANLAGSPAIKKGILQTVKVVDELVKVMGRHKPENIVIEMARENQTTQKGQKNSRERMKRIEEGIKELGSQILKEHPVENTQLQNEKLYLYYLQNGRDMYVDQELDINRLSDYDVDHIVPQSFLKDDSIDNKVLTRSDKARGKSDNVPSEEVVKKMKNYWRQLLNAKLITQRKFDNLTKAERGGLSELDKAGFIKRQLVETRQITKHVAQILDSRMNTKYDENDKLIREVKVITLKSKLVSDFRKDFQFYKVREINNYHHAHDAYLNAVVGTALIKKYPKLESEFVYGDYKVYDVRKMIAKSEQEIGKATAKYFFYSNIMNFFKTEITLANGEIRKRPLIETNGETGEIVWDKGRDFATVRKVLSMPQVNIVKKTEVQTGGFSKESILPKRNSDKLIARKKDWDPKKYGGFDSPTVAYSVLVVAKVEKGKSKKLKSVKELLGITIMERSSFEKNPIDFLEAKGYKEVKKDLIIKLPKYSLFELENGRKRMLASAGELQKGNELALPSKYVNFLYLASHYEKLKGSPEDNEQKQLFVEQHKHYLDEIIEQISEFSKRVILADANLDKVLSAYNKHRDKPIREQAENIIHLFTLTNLGAPAAFKYFDTTIDRKRYTSTKEVLDATLIHQSITGLYETRIDLSQLGGDGGGGGGGSEAAAKGGIPWLMKKPLQLTTLVPLQEYEERLLKQTMLTGSYKEKLQSLFLKYDALWQHWENQVGHRRIKPHHIATGTVNPRPQKQYPINPKAKASIQTVINDLLKQGVLIQQNSIMNTPVYPVPKPDGKWRMVLDYREVNKTIPLIAAQNQHSAGILSSIFRGKYKTTLDLSNGFWAHSITPESYWLTAFTWLGQQYCWTRLPQGFLNSPALFNADVVDLLKEVPNVQVYVDDIYISHDDPREHLEQLEKVFSLLLNAGYVVSLKKSEIAQHEVEFLGFNITKEGRGLTETFKQKLLNITPPRDLKQLQSILGKLNFARNFIPNFSELVKPLYNIIATAPGKYITWTTDNSQQLQNIISMLNSAENLEERNPEVRLIMKVNTSPSAGYIRFYNEFAKRPIMYLNYVYTKAEVKFTNTEKLLTTIHKGLIKALDLGMGQEILVYSPIVSMTKIQKTPLPERKALPIRWITWMSYLEDPRIQFHYDKTLPELQQVPTVTDDIIAKIKHPSEFSMVFYTDGSAIKHPNVNKSHNAGMGIAQVQFKPEFTVINTWSIPLGDHTAQLAEVAAVEFACKKALKIDGPVLIVTDSFYVAESVNKELPYWQSNGFFNNKKKPLKHVSKWKSIADCIQLKPDIIIIHEKGHQPTASTFHTEGNNLADKLATQGSYVVNAGKRTADGSEFEKRTADGSEFESPKKKAKVE

SEQ ID NO: 6924 - protein, 2094 aa, synthetic construct
MPAAKRVKLDGGDKKYSIGLDIGTNSVGWAVITDEYKVPSKKFKVLGNTDRHSIKKNLIGALLFDSGETAEATRLKRTARRRYTRRKNRICYLQEIFSNEMAKVDDSFFHRLEESFLVEEDKKHERHPIFGNIVDEVAYHEKYPTIYHLRKKLVDSTDKADLRLIYLALAHMIKFRGHFLIEGDLNPDNSDVDKLFIQLVQTYNQLFEENPINASGVDAKAILSARLSKSRRLENLIAQLPGEKKNGLFGNLIALSLGLTPNFKSNFDLAEDAKLQLSKDTYDDDLDNLLAQIGDQYADLFLAAKNLSDAILLSDILRVNTEITKAPLSASMIKRYDEHHQDLTLLKALVRQQLPEKYKEIFFDQSKNGYAGYIDGGASQEEFYKFIKPILEKMDGTEELLVKLNREDLLRKQRTFDNGSIPHQIHLGELHAILRRQEDFYPFLKDNREKIEKILTFRIPYYVGPLARGNSRFAWMTRKSEETITPWNFEEVVDKGASAQSFIERMTNFDKNLPNEKVLPKHSLLYEYFTVYNELTKVKYVTEGMRKPAFLSGEQKKAIVDLLFKTNRKVTVKQLKEDYFKKIECFDSVEISGVEDRFNASLGTYHDLLKIIKDKDFLDNEENEDILEDIVLTLTLFEDREMIEERLKTYAHLFDDKVMKQLKRRRYTGWGRLSRKLINGIRDKQSGKTILDFLKSDGFANRNFMQLIHDDSLTFKEDIQKAQVSGQGDSLHEHIANLAGSPAIKKGILQTVKVVDELVKVMGRHKPENIVIEMARENQTTQKGQKNSRERMKRIEEGIKELGSQILKEHPVENTQLQNEKLYLYYLQNGRDMYVDQELDINRLSDYDVDHIVPQSFLKDDSIDNKVLTRSDKARGKSDNVPSEEVVKKMKNYWRQLLNAKLITQRKFDNLTKAERGGLSELDKAGFIKRQLVETRQITKHVAQILDSRMNTKYDENDKLIREVKVITLKSKLVSDFRKDFQFYKVREINNYHHAHDAYLNAVVGTALIKKYPKLESEFVYGDYKVYDVRKMIAKSEQEIGKATAKYFFYSNIMNFFKTEITLANGEIRKRPLIETNGETGEIVWDKGRDFATVRKVLSMPQVNIVKKTEVQTGGFSKESILPKRNSDKLIARKKDWDPKKYGGFDSPTVAYSVLVVAKVEKGKSKKLKSVKELLGITIMERSSFEKNPIDFLEAKGYKEVKKDLIIKLPKYSLFELENGRKRMLASAGELQKGNELALPSKYVNFLYLASHYEKLKGSPEDNEQKQLFVEQHKHYLDEIIEQISEFSKRVILADANLDKVLSAYNKHRDKPIREQAENIIHLFTLTNLGAPAAFKYFDTTIDRKRYTSTKEVLDATLIHQSITGLYETRIDLSQLGGDGGGGGGGSEAAAKGGVLNLEEEYRLHEKPVPSSIDPSWLQLFPTVWAERAGMGLANQVPPVVVELRSGASPVAVRQYPMSKEAREGIRPHIQRFLDLGVLVPCQSPWNTPLLPVKKPGTNDYRPVQDLREINKRVQDIHPTVPNPYNLLSSLPPSHTWYSVLDLKDAFFCLKLHPNSQPLFAFEWRDPEKGNTGQLTWTRLPQGFKNSPTLFNEALHRDLAPFRALNPQVVLLQYVDDLLVAAPTYRDCKEGTQKLLQELSKLGYRVSAKKAQLCQKEVTYLGYLLKEGKRWLTPARKATVMKIPPPTTPRQVREFLGKAGFCRLFIPGFASLAAPLYPLTKPSIPFIWTEEHQKAFDRIKEALLSAPALALPDLTKPFTLYVDERAGVARGVLTQTLGPWRRPVAYLSKKLDPVASGWPTCLKAVAAVALLLKDADKLTLGQNVTVIASHSLESIVRQPPDRWMTNARMTHYQSLLLNERVSFAPPAVLNPATLLPVESEATPVHRCSEILAEETGTRRDLKDQPLPGVPAWYTDGSSFIAEGKRRAGAAIVDGKRTVWASSLPEGTSAQKAELVALTQALRLAEGKDINIYTDSRYAFATAHIHGAIYKQRGWLTSAGKDIKNKEEILALLEAIHLPKRVAIIHCPGHQKGNDPVATGNRRADEAAKQAALSTRVLAETTKPAGKRTADGSEFEKRTADGSEFESPKKKAKVE

SEQ ID NO: 6925 - protein, 2096 aa, synthetic construct; identical to SEQ ID NO: 4519

SEQ ID NO: 6926 - protein, 2095 aa, synthetic construct
MPAAKRVKLDGGDKKYSIGLDIGTNSVGWAVITDEYKVPSKKFKVLGNTDRHSIKKNLIGALLFDSGETAEATRLKRTARRRYTRRKNRICYLQEIFSNEMAKVDDSFFHRLEESFLVEEDKKHERHPIFGNIVDEVAYHEKYPTIYHLRKKLVDSTDKADLRLIYLALAHMIKFRGHFLIEGDLNPDNSDVDKLFIQLVQTYNQLFEENPINASGVDAKAILSARLSKSRRLENLIAQLPGEKKNGLFGNLIALSLGLTPNFKSNFDLAEDAKLQLSKDTYDDDLDNLLAQIGDQYADLFLAAKNLSDAILLSDILRVNTEITKAPLSASMIKRYDEHHQDLTLLKALVRQQLPEKYKEIFFDQSKNGYAGYIDGGASQEEFYKFIKPILEKMDGTEELLVKLNREDLLRKQRTFDNGSIPHQIHLGELHAILRRQEDFYPFLKDNREKIEKILTFRIPYYVGPLARGNSRFAWMTRKSEETITPWNFEEVVDKGASAQSFIERMTNFDKNLPNEKVLPKHSLLYEYFTVYNELTKVKYVTEGMRKPAFLSGEQKKAIVDLLFKTNRKVTVKQLKEDYFKKIECFDSVEISGVEDRFNASLGTYHDLLKIIKDKDFLDNEENEDILEDIVLTLTLFEDREMIEERLKTYAHLFDDKVMKQLKRRRYTGWGRLSRKLINGIRDKQSGKTILDFLKSDGFANRNFMQLIHDDSLTFKEDIQKAQVSGQGDSLHEHIANLAGSPAIKKGILQTVKVVDELVKVMGRHKPENIVIEMARENQTTQKGQKNSRERMKRIEEGIKELGSQILKEHPVENTQLQNEKLYLYYLQNGRDMYVDQELDINRLSDYDVDHIVPQSFLKDDSIDNKVLTRSDKARGKSDNVPSEEVVKKMKNYWRQLLNAKLITQRKFDNLTKAERGGLSELDKAGFIKRQLVETRQITKHVAQILDSRMNTKYDENDKLIREVKVITLKSKLVSDFRKDFQFYKVREINNYHHAHDAYLNAVVGTALIKKYPKLESEFVYGDYKVYDVRKMIAKSEQEIGKATAKYFFYSNIMNFFKTEITLANGEIRKRPLIETNGETGEIVWDKGRDFATVRKVLSMPQVNIVKKTEVQTGGFSKESILPKRNSDKLIARKKDWDPKKYGGFDSPTVAYSVLVVAKVEKGKSKKLKSVKELLGITIMERSSFEKNPIDFLEAKGYKEVKKDLIIKLPKYSLFELENGRKRMLASAGELQKGNELALPSKYVNFLYLASHYEKLKGSPEDNEQKQLFVEQHKHYLDEIIEQISEFSKRVILADANLDKVLSAYNKHRDKPIREQAENIIHLFTLTNLGAPAAFKYFDTTIDRKRYTSTKEVLDATLIHQSITGLYETRIDLSQLGGDGGGGGEAAAKGGSGGTLQLEEEYRLFEPESTQKQEMDIWLKNFPQAWAETGGMGTAHCQAPVLIQLKATATPISIRQYPMPHEAYQGIKPHIRRMLDQGILKPCQSPWNTPLLPVKKPGTEDYRPVQDLREVNKRVEDIHPTVPNPYNLLSTLPPSHPWYTVLDLKDAFFCLRLHSESQLLFAFEWRDPEIGLSGQLTWTRLPQGFKNSPTLFNEALHSDLADFRVRYPALVLLQYVDDLLLAAATRTECLEGTKALLETLGNKGYRASAKKAQICLQEVTYLGYSLKDGQRWLTKARKEAILSIPVPKNSRQVREFLGTAGYCRLWIPGFAELAAPLYPLTRPGTLFQWGTEQQLAFEDIKKALLSSPALGLPDITKPFELFIDENSGFAKGVLVQKLGPWKRPVAYLSKKLDTVASGWPPCLRMVAAIAILVKDAGKLTLGQPLTILTSHPVEALVRQPPNKWLSNARMTHYQAMLLDAERVHFGPTVSLNPATLLPLPSGGNHHDCLQILAETHGTRPDLTDQPLPDADLTWYTDGSSFIRNGEREAGAAVTTESEVIWAAPLPPGTSAQRAELIALTQALKMAEGKKLTVYTDSRYAFATTHVHGEIYRRRGWLTSEGKEIKNKNEILALLEALFLPKRLSIIHCPGHQKGDSPQAKGNRLADDTAKKAATETHSSLTVLPAGKRTADGSEFEKRTADGSEFESPKKKAKVE

SEQ ID NO: 6927 - protein, 2094 aa, synthetic construct
MPAAKRVKLDGGDKKYSIGLDIGTNSVGWAVITDEYKVPSKKFKVLGNTDRHSIKKNLIGALLFDSGETAEATRLKRTARRRYTRRKNRICYLQEIFSNEMAKVDDSFFHRLEESFLVEEDKKHERHPIFGNIVDEVAYHEKYPTIYHLRKKLVDSTDKADLRLIYLALAHMIKFRGHFLIEGDLNPDNSDVDKLFIQLVQTYNQLFEENPINASGVDAKAILSARLSKSRRLENLIAQLPGEKKNGLFGNLIALSLGLTPNFKSNFDLAEDAKLQLSKDTYDDDLDNLLAQIGDQYADLFLAAKNLSDAILLSDILRVNTEITKAPLSASMIKRYDEHHQDLTLLKALVRQQLPEKYKEIFFDQSKNGYAGYIDGGASQEEFYKFIKPILEKMDGTEELLVKLNREDLLRKQRTFDNGSIPHQIHLGELHAILRRQEDFYPFLKDNREKIEKILTFRIPYYVGPLARGNSRFAWMTRKSEETITPWNFEEVVDKGASAQSFIERMTNFDKNLPNEKVLPKHSLLYEYFTVYNELTKVKYVTEGMRKPAFLSGEQKKAIVDLLFKTNRKVTVKQLKEDYFKKIECFDSVEISGVEDRFNASLGTYHDLLKIIKDKDFLDNEENEDILEDIVLTLTLFEDREMIEERLKTYAHLFDDKVMKQLKRRRYTGWGRLSRKLINGIRDKQSGKTILDFLKSDGFANRNFMQLIHDDSLTFKEDIQKAQVSGQGDSLHEHIANLAGSPAIKKGILQTVKVVDELVKVMGRHKPENIVIEMARENQTTQKGQKNSRERMKRIEEGIKELGSQILKEHPVENTQLQNEKLYLYYLQNGRDMYVDQELDINRLSDYDVDHIVPQSFLKDDSIDNKVLTRSDKARGKSDNVPSEEVVKKMKNYWRQLLNAKLITQRKFDNLTKAERGGLSELDKAGFIKRQLVETRQITKHVAQILDSRMNTKYDENDKLIREVKVITLKSKLVSDFRKDFQFYKVREINNYHHAHDAYLNAVVGTALIKKYPKLESEFVYGDYKVYDVRKMIAKSEQEIGKATAKYFFYSNIMNFFKTEITLANGEIRKRPLIETNGETGEIVWDKGRDFATVRKVLSMPQVNIVKKTEVQTGGFSKESILPKRNSDKLIARKKDWDPKKYGGFDSPTVAYSVLVVAKVEKGKSKKLKSVKELLGITIMERSSFEKNPIDFLEAKGYKEVKKDLIIKLPKYSLFELENGRKRMLASAGELQKGNELALPSKYVNFLYLASHYEKLKGSPEDNEQKQLFVEQHKHYLDEIIEQISEFSKRVILADANLDKVLSAYNKHRDKPIREQAENIIHLFTLTNLGAPAAFKYFDTTIDRKRYTSTKEVLDATLIHQSITGLYETRIDLSQLGGDGGGGGEAAAKGGSGGVLNLEEEYRLHEKPVPSSIDPSWLQLFPTVWAERAGMGLANQVPPVVVELRSGASPVAVRQYPMSKEAREGIRPHIQKFLDLGVLVPCRSPWNTPLLPVKKPGTNDYRPVQDLREINKRVQDIHPTVPNPYNLLSSLPPSYTWYSVLDLKDAFFCLRLHPNSQPLFAFEWKDPEKGNTGQLTWTRLPQGFKNSPTLFNEALHRDLAPFRALNPQVVLLQYVDDLLVAAPTYEDCKKGTQKLLQELSKLGYRVSAKKAQLCQREVTYLGYLLKEGKRWLTPARKATVMKIPVPTTPRQVREFLGKAGFCRLFIPGFASLAAPLYPLTKPSIPFIWTEEHQQAFDHIKKALLSAPALALPDLTKPFTLYIDERAGVARGVLTQTLGPWRRPVAYLSKKLDPVASGWPTCLKAVAAVALLLKDADKLTLGQNVTVIASHSLESIVRQPPDRWMTNARMTHYQSLLLNERVSFAPPAVLNPATLLPVESEATPVHRCSEILAEETGTRRDLEDQPLPGVPTWYTDGSSFITEGKRRAGAPIVDGKRTVWASSLPEGTSAQKAELVALTQALRLAEGKNINIYTDSRYAFATAHIHGAIYKQRGWLTSAGKDIKNKEEILALLEAIHLPRRVAIIHCPGHQRGSNPVATGNRRADEAAKQAALSTRVLAGTTKPAGKRTADGSEFEKRTADGSEFESPKKKAKVE

SEQ ID NO: 6928 - protein, 2218 aa, synthetic construct
MPAAKRVKLDGGDKKYSIGLDIGTNSVGWAVITDEYKVPSKKFKVLGNTDRHSIKKNLIGALLFDSGETAEATRLKRTARRRYTRRKNRICYLQEIFSNEMAKVDDSFFHRLEESFLVEEDKKHERHPIFGNIVDEVAYHEKYPTIYHLRKKLVDSTDKADLRLIYLALAHMIKFRGHFLIEGDLNPDNSDVDKLFIQLVQTYNQLFEENPINASGVDAKAILSARLSKSRRLENLIAQLPGEKKNGLFGNLIALSLGLTPNFKSNFDLAEDAKLQLSKDTYDDDLDNLLAQIGDQYADLFLAAKNLSDAILLSDILRVNTEITKAPLSASMIKRYDEHHQDLTLLKALVRQQLPEKYKEIFFDQSKNGYAGYIDGGASQEEFYKFIKPILEKMDGTEELLVKLNREDLLRKQRTFDNGSIPHQIHLGELHAILRRQEDFYPFLKDNREKIEKILTFRIPYYVGPLARGNSRFAWMTRKSEETITPWNFEEVVDKGASAQSFIERMTNFDKNLPNEKVLPKHSLLYEYFTVYNELTKVKYVTEGMRKPAFLSGEQKKAIVDLLFKTNRKVTVKQLKEDYFKKIECFDSVEISGVEDRFNASLGTYHDLLKIIKDKDFLDNEENEDILEDIVLTLTLFEDREMIEERLKTYAHLFDDKVMKQLKRRRYTGWGRLSRKLINGIRDKQSGKTILDFLKSDGFANRNFMQLIHDDSLTFKEDIQKAQVSGQGDSLHEHIANLAGSPAIKKGILQTVKVVDELVKVMGRHKPENIVIEMARENQTTQKGQKNSRERMKRIEEGIKELGSQILKEHPVENTQLQNEKLYLYYLQNGRDMYVDQELDINRLSDYDVDHIVPQSFLKDDSIDNKVLTRSDKARGKSDNVPSEEVVKKMKNYWRQLLNAKLITQRKFDNLTKAERGGLSELDKAGFIKRQLVETRQITKHVAQILDSRMNTKYDENDKLIREVKVITLKSKLVSDFRKDFQFYKVREINNYHHAHDAYLNAVVGTALIKKYPKLESEFVYGDYKVYDVRKMIAKSEQEIGKATAKYFFYSNIMNFFKTEITLANGEIRKRPLIETNGETGEIVWDKGRDFATVRKVLSMPQVNIVKKTEVQTGGFSKESILPKRNSDKLIARKKDWDPKKYGGFDSPTVAYSVLVVAKVEKGKSKKLKSVKELLGITIMERSSFEKNPIDFLEAKGYKEVKKDLIIKLPKYSLFELENGRKRMLASAGELQKGNELALPSKYVNFLYLASHYEKLKGSPEDNEQKQLFVEQHKHYLDEIIEQISEFSKRVILADANLDKVLSAYNKHRDKPIREQAENIIHLFTLTNLGAPAAFKYFDTTIDRKRYTSTKEVLDATLIHQSITGLYETRIDLSQLGGDGGGGGEAAAKGGSGGTLGDQGSRGSDPLPEPRVTLTVEGIPTEFLVNTGAEHSVLTKPMGKMGSKRTVVAGATGSKVYPWTTKRLLKIGQKQVTHSFLVIPECPAPLLGRDLLTKLKAQIQFSTEGPQVTWEDRPAMCLVLNLEEEYRLHEKPVPPSIDPSWLQLFPMVWAEKAGMGLANQVPPVVVELKSDASPVAVRQYPMSKEAREGIRPHIQRFLDLGILVPCQSPWNTPLLPVKKPGTNDYRPVQDLREVNKRVQDIHPTVPNPYNLLSSLPPSHTWYSVLDLKDAFFCLKLHPNSQPLFAFEWRDPEKGNTGQLTWTRLPQGFKNSPTLFNEALHRDLASFRALNPQVVMLQYVDDLLVAAPTYRDCKEGTRRLLQELSKLGYRVSAKKAQLCREEVTYLGYLLKGGKRWLTPARKATVMKIPTPTTPRQVREFLGTAGFCRLWIPGFASLAAPLYPLTRPKVPFTWTEAHQEAFGRIKEALLSAPALALPDLTKPFALYVDEKEGVARGVLTQTLGPWRRPVAYLSKKLDPVASGWPTCLKAIAAVALLLKDADKLTLGQNVLVIAPHNLESIVRQPPDRWMTNARMTHYQSLLLNERVSFAPPAILNPATLLPVESDDTPIHICSEILAEETGTRPDLRDQPLPGVPAWYTDGSSFIMDGRRQAGAAIVDNKRTVWASNLPEGTSAQKAELIALTQALRLAEGKSINIYTDSRYAFATAHVHGAIYKQRGWLTSAGKDIKNKEEILALLEAIHLPKRVAIIHCPGHQRGTDPVATGNRKADEAAKQAAQSTRILTETTKNAGKRTADGSEFEKRTADGSEFESPKKKAKVE

SEQ ID NO: 6929 - protein, 2096 aa, synthetic construct
MPAAKRVKLDGGDKKYSIGLDIGTNSVGWAVITDEYKVPSKKFKVLGNTDRHSIKKNLIGALLFDSGETAEATRLKRTARRRYTRRKNRICYLQEIFSNEMAKVDDSFFHRLEESFLVEEDKKHERHPIFGNIVDEVAYHEKYPTIYHLRKKLVDSTDKADLRLIYLALAHMIKFRGHFLIEGDLNPDNSDVDKLFIQLVQTYNQLFEENPINASGVDAKAILSARLSKSRRLENLIAQLPGEKKNGLFGNLIALSLGLTPNFKSNFDLAEDAKLQLSKDTYDDDLDNLLAQIGDQYADLFLAAKNLSDAILLSDILRVNTEITKAPLSASMIKRYDEHHQDLTLLKALVRQQLPEKYKEIFFDQSKNGYAGYIDGGASQEEFYKFIKPILEKMDGTEELLVKLNREDLLRKQRTFDNGSIPHQIHLGELHAILRRQEDFYPFLKDNREKIEKILTFRIPYYVGPLARGNSRFAWMTRKSEETITPWNFEEVVDKGASAQSFIERMTNFDKNLPNEKVLPKHSLLYEYFTVYNELTKVKYVTEGMRKPAFLSGEQKKAIVDLLFKTNRKVTVKQLKEDYFKKIECFDSVEISGVEDRFNASLGTYHDLLKIIKDKDFLDNEENEDILEDIVLTLTLFEDREMIEERLKTYAHLFDDKVMKQLKRRRYTGWGRLSRKLINGIRDKQSGKTILDFLKSDGFANRNFMQLIHDDSLTFKEDIQKAQVSGQGDSLHEHIANLAGSPAIKKGILQTVKVVDELVKVMGRHKPENIVIEMARENQTTQKGQKNSRERMKRIEEGIKELGSQILKEHPVENTQLQNEKLYLYYLQNGRDMYVDQELDINRLSDYDVDHIVPQSFLKDDSIDNKVLTRSDKARGKSDNVPSEEVVKKMKNYWRQLLNAKLITQRKFDNLTKAERGGLSELDKAGFIKRQLVETRQITKHVAQILDSRMNTKYDENDKLIREVKVITLKSKLVSDFRKDFQFYKVREINNYHHAHDAYLNAVVGTALIKKYPKLESEFVYGDYKVYDVRKMIAKSEQEIGKATAKYFFYSNIMNFFKTEITLANGEIRKRPLIETNGETGEIVWDKGRDFATVRKVLSMPQVNIVKKTEVQTGGFSKESILPKRNSDKLIARKKDWDPKKYGGFDSPTVAYSVLVVAKVEKGKSKKLKSVKELLGITIMERSSFEKNPIDFLEAKGYKEVKKDLIIKLPKYSLFELENGRKRMLASAGELQKGNELALPSKYVNFLYLASHYEKLKGSPEDNEQKQLFVEQHKHYLDEIIEQISEFSKRVILADANLDKVLSAYNKHRDKPIREQAENIIHLFTLTNLGAPAAFKYFDTTIDRKRYTSTKEVLDATLIHQSITGLYETRIDLSQLGGDGGGGGEAAAKGGSGGTLNIEDEYRLHETSKGPDVPLGSTWLSDFPQAWAETGGMGLAFRQAPLIISLKATSTPVSIKQYPMSQEARLGIKPHIQRLLDQGILVPCQSPWNTPLLPVKKPGTNDYRPVQDLREVNKRVEDIHPTVPNPYNLLSGLPPSHQWYTVLDLKDAFFCLRLHPTSQSLFAFEWKDPEMGISGQLTWTRLPQGFKNSPTLFNEALHRDLADFRIQHPDLILLQYVDDLLLAATSELDCQQGTRALLQTLGDLGYRASAKKAQICQKQVKYLGYLLKEGQRWLTEARKETVMGQPTPKTPRQLREFLGKAGLCRLFIPGFAEMAAPLYPLTKPGTLFKWGPDQQKAYQEIKQALLTAPALGLPDLTKPFELFVDEKQGYAKGVLTQKLGPWRRPVAYLSKKLDPVAAGWPPCLRMVAAIAVLTKDVGKLTMGQPLVILAPHAVEALVKQPPDRWLSNARMTHYQALLLDTDRVQFGPIVALNPATLLPLPEEGLQHDCLDILAEAHGTRPDLTDQPLPDADHTWYTDGSSFLQEGQRRAGAAVTTETEVIWAKALPAGTSAQRAELIALTQALKMAAGKKLNVYTDSRYAFATAHIHGEIYRRRGWLTSEGKEIKNKDEILALLKALFLPKRLSIIHCPGHQKGNHAEARGNRMADQAAREVATRETPETSTLLAGKRTADGSEFEKRTADGSEFESPKKKAKVE

SEQ ID NO: 6930 - protein, 2096 aa, synthetic construct
MPAAKRVKLDGGDKKYSIGLDIGTNSVGWAVITDEYKVPSKKFKVLGNTDRHSIKKNLIGALLFDSGETAEATRLKRTARRRYTRRKNRICYLQEIFSNEMAKVDDSFFHRLEESFLVEEDKKHERHPIFGNIVDEVAYHEKYPTIYHLRKKLVDSTDKADLRLIYLALAHMIKFRGHFLIEGDLNPDNSDVDKLFIQLVQTYNQLFEENPINASGVDAKAILSARLSKSRRLENLIAQLPGEKKNGLFGNLIALSLGLTPNFKSNFDLAEDAKLQLSKDTYDDDLDNLLAQIGDQYADLFLAAKNLSDAILLSDILRVNTEITKAPLSASMIKRYDEHHQDLTLLKALVRQQLPEKYKEIFFDQSKNGYAGYIDGGASQEEFYKFIKPILEKMDGTEELLVKLNREDLLRKQRTFDNGSIPHQIHLGELHAILRRQEDFYPFLKDNREKIEKILTFRIPYYVGPLARGNSRFAWMTRKSEETITPWNFEEVVDKGASAQSFIERMTNFDKNLPNEKVLPKHSLLYEYFTVYNELTKVKYVTEGMRKPAFLSGEQKKAIVDLLFKTNRKVTVKQLKEDYFKKIECFDSVEISGVEDRFNASLGTYHDLLKIIKDKDFLDNEENEDILEDIVLTLTLFEDREMIEERLKTYAHLFDDKVMKQLKRRRYTGWGRLSRKLINGIRDKQSGKTILDFLKSDGFANRNFMQLIHDDSLTFKEDIQKAQVSGQGDSLHEHIANLAGSPAIKKGILQTVKVVDELVKVMGRHKPENIVIEMARENQTTQKGQKNSRERMKRIEEGIKELGSQILKEHPVENTQLQNEKLYLYYLQNGRDMYVDQELDINRLSDYDVDHIVPQSFLKDDSIDNKVLTRSDKARGKSDNVPSEEVVKKMKNYWRQLLNAKLITQRKFDNLTKAERGGLSELDKAGFIKRQLVETRQITKHVAQILDSRMNTKYDENDKLIREVKVITLKSKLVSDFRKDFQFYKVREINNYHHAHDAYLNAVVGTALIKKYPKLESEFVYGDYKVYDVRKMIAKSEQEIGKATAKYFFYSNIMNFFKTEITLANGEIRKRPLIETNGETGEIVWDKGRDFATVRKVLSMPQVNIVKKTEVQTGGFSKESILPKRNSDKLIARKKDWDPKKYGGFDSPTVAYSVLVVAKVEKGKSKKLKSVKELLGITIMERSSFEKNPIDFLEAKGYKEVKKDLIIKLPKYSLFELENGRKRMLASAGELQKGNELALPSKYVNFLYLASHYEKLKGSPEDNEQKQLFVEQHKHYLDEIIEQISEFSKRVILADANLDKVLSAYNKHRDKPIREQAENIIHLFTLTNLGAPAAFKYFDTTIDRKRYTSTKEVLDATLIHQSITGLYETRIDLSQLGGDGGGGGEAAAKGGSGGTLNIEDEYRLHETSKGPDVPLGSTWLSDFPQAWAETGGMGLAVRQAPLIIPLKATSTPVSIKQYPMSQEARLGIKPHIQRLLDQGILVPCQSPWNTPLLPVKKPGTNDYRPVQDLREVNKRVEDIHPTVPNPYNLLSGLPPSHQWYTVLDLKDAFFCLRLHPTSQSLFAFEWRDPEMGISGQLTWTRLPQGFKNSPTLFNEALHRDLADFRIQHPDLILLQYVDDLLLAATSELDCQQGTRALLQTLGDLGYRASAKKAQICQKQVKYLGYLLKEGQRWLTEARKETVMGQPTPKTPRQLREFLGTAGFCRLWIPGFAEMAAPLYPLTKPGTLFEWGPDQQKAYQEIKQALLTAPALGLPDLTKPFELFVDEKQGYAKGVLTQKLGPWRRPVAYLSKKLDPVAAGWPPCLRMVAAIAVLTKDAGKLTMGQPLVILAPHAVEALVKQPPDRWLSNARMTHYQALLLDTDRVQFGPIVALNPATLLPLPEEGLQHDCLDILAEAHGTRPDLTDQPLPDADHTWYTDGSSFLQEGQRKAGAAVTTETEVVWAKALPAGTSAQRAELIALTQALKMAEGKKLNVYTDSRYAFATAHIHGEIYRRRGWLTSEGKEIKNKDEILALLKALFLPKRLSIIHCPGHQKGNRAEARGNRMADQAAREVATRETPETSTLLAGKRTADGSEFEKRTADGSEFESPKKKAKVE

SEQ ID NO: 6931 - protein, 2090 aa, synthetic construct
MPAAKRVKLDGGDKKYSIGLDIGTNSVGWAVITDEYKVPSKKFKVLGNTDRHSIKKNLIGALLFDSGETAEATRLKRTARRRYTRRKNRICYLQEIFSNEMAKVDDSFFHRLEESFLVEEDKKHERHPIFGNIVDEVAYHEKYPTIYHLRKKLVDSTDKADLRLIYLALAHMIKFRGHFLIEGDLNPDNSDVDKLFIQLVQTYNQLFEENPINASGVDAKAILSARLSKSRRLENLIAQLPGEKKNGLFGNLIALSLGLTPNFKSNFDLAEDAKLQLSKDTYDDDLDNLLAQIGDQYADLFLAAKNLSDAILLSDILRVNTEITKAPLSASMIKRYDEHHQDLTLLKALVRQQLPEKYKEIFFDQSKNGYAGYIDGGASQEEFYKFIKPILEKMDGTEELLVKLNREDLLRKQRTFDNGSIPHQIHLGELHAILRRQEDFYPFLKDNREKIEKILTFRIPYYVGPLARGNSRFAWMTRKSEETITPWNFEEVVDKGASAQSFIERMTNFDKNLPNEKVLPKHSLLYEYFTVYNELTKVKYVTEGMRKPAFLSGEQKKAIVDLLFKTNRKVTVKQLKEDYFKKIECFDSVEISGVEDRFNASLGTYHDLLKIIKDKDFLDNEENEDILEDIVLTLTLFEDREMIEERLKTYAHLFDDKVMKQLKRRRYTGWGRLSRKLINGIRDKQSGKTILDFLKSDGFANRNFMQLIHDDSLTFKEDIQKAQVSGQGDSLHEHIANLAGSPAIKKGILQTVKVVDELVKVMGRHKPENIVIEMARENQTTQKGQKNSRERMKRIEEGIKELGSQILKEHPVENTQLQNEKLYLYYLQNGRDMYVDQELDINRLSDYDVDHIVPQSFLKDDSIDNKVLTRSDKARGKSDNVPSEEVVKKMKNYWRQLLNAKLITQRKFDNLTKAERGGLSELDKAGFIKRQLVETRQITKHVAQILDSRMNTKYDENDKLIREVKVITLKSKLVSDFRKDFQFYKVREINNYHHAHDAYLNAVVGTALIKKYPKLESEFVYGDYKVYDVRKMIAKSEQEIGKATAKYFFYSNIMNFFKTEITLANGEIRKRPLIETNGETGEIVWDKGRDFATVRKVLSMPQVNIVKKTEVQTGGFSKESILPKRNSDKLIARKKDWDPKKYGGFDSPTVAYSVLVVAKVEKGKSKKLKSVKELLGITIMERSSFEKNPIDFLEAKGYKEVKKDLIIKLPKYSLFELENGRKRMLASAGELQKGNELALPSKYVNFLYLASHYEKLKGSPEDNEQKQLFVEQHKHYLDEIIEQISEFSKRVILADANLDKVLSAYNKHRDKPIREQAENIIHLFTLTNLGAPAAFKYFDTTIDRKRYTSTKEVLDATLIHQSITGLYETRIDLSQLGGDGGGGGEAAAKGGSGGTLQLDDEYRLYSPLVKPDQNIQFWLEQFPQAWAETAGMGLAKQVPPQVIQLKASATPVSVRQYPLSKEAQEGIRPHVQRLIQQGILVPVQSPWNTPLLPVRKPGTNDYRPVQDLREVNKRVQDIHPTVPNPYNLLCALPPQRSWYTVLDLKDAFFCLRLHPTSQPLFAFEWRDPGTGRTGQLTWTRLPQGFKNSPTIFDEALHRDLANFRIQHPQVTLLQYVDDLLLAGATKQDCLEGTKALLLELSDLGYRASAKKAQICRREVTYLGYSLRDGQRWLTEARKKTVVQIPAPTTAKQVREFLGTAGFCRLWIPGFATLAAPLYPLTKEKGEFSWAPEHQKAFDAIKKALLSAPALALPDVTKPFTLYVDERKGVARGVLTQTLGPWRRPVAYLSKKLDPVASGWPVCLKAIAAVAILVKDADKLTLGQNITVIAPHALENIVRQPPDRWMTNARMTHYQSLLLTERVTFAPPAALNPATLLPEETDEPVTHDCHQLLIEETGVRKDLTDIPLTGEVLTWFTDGSSYVVEGKRMAGAAVVDGTRTIWASSLPEGTSAQKAELMALTQALRLAEGKSINIYTDSRYAFATAHVHGAIYKQRGLLTSAGREIKNKEEILSLLEALHLPKRLAIIHCPGHQKAKDPISRGNQMADRVAKQAAQGVNLLAGKRTADGSEFEKRTADGSEFESPKKKAKVE

SEQ ID NO: 6932 - protein, 2087 aa, synthetic construct
MPAAKRVKLDGGDKKYSIGLDIGTNSVGWAVITDEYKVPSKKFKVLGNTDRHSIKKNLIGALLFDSGETAEATRLKRTARRRYTRRKNRICYLQEIFSNEMAKVDDSFFHRLEESFLVEEDKKHERHPIFGNIVDEVAYHEKYPTIYHLRKKLVDSTDKADLRLIYLALAHMIKFRGHFLIEGDLNPDNSDVDKLFIQLVQTYNQLFEENPINASGVDAKAILSARLSKSRRLENLIAQLPGEKKNGLFGNLIALSLGLTPNFKSNFDLAEDAKLQLSKDTYDDDLDNLLAQIGDQYADLFLAAKNLSDAILLSDILRVNTEITKAPLSASMIKRYDEHHQDLTLLKALVRQQLPEKYKEIFFDQSKNGYAGYIDGGASQEEFYKFIKPILEKMDGTEELLVKLNREDLLRKQRTFDNGSIPHQIHLGELHAILRRQEDFYPFLKDNREKIEKILTFRIPYYVGPLARGNSRFAWMTRKSEETITPWNFEEVVDKGASAQSFIERMTNFDKNLPNEKVLPKHSLLYEYFTVYNELTKVKYVTEGMRKPAFLSGEQKKAIVDLLFKTNRKVTVKQLKEDYFKKIECFDSVEISGVEDRFNASLGTYHDLLKIIKDKDFLDNEENEDILEDIVLTLTLFEDREMIEERLKTYAHLFDDKVMKQLKRRRYTGWGRLSRKLINGIRDKQSGKTILDFLKSDGFANRNFMQLIHDDSLTFKEDIQKAQVSGQGDSLHEHIANLAGSPAIKKGILQTVKVVDELVKVMGRHKPENIVIEMARENQTTQKGQKNSRERMKRIEEGIKELGSQILKEHPVENTQLQNEKLYLYYLQNGRDMYVDQELDINRLSDYDVDHIVPQSFLKDDSIDNKVLTRSDKARGKSDNVPSEEVVKKMKNYWRQLLNAKLITQRKFDNLTKAERGGLSELDKAGFIKRQLVETRQITKHVAQILDSRMNTKYDENDKLIREVKVITLKSKLVSDFRKDFQFYKVREINNYHHAHDAYLNAVVGTALIKKYPKLESEFVYGDYKVYDVRKMIAKSEQEIGKATAKYFFYSNIMNFFKTEITLANGEIRKRPLIETNGETGEIVWDKGRDFATVRKVLSMPQVNIVKKTEVQTGGFSKESILPKRNSDKLIARKKDWDPKKYGGFDSPTVAYSVLVVAKVEKGKSKKLKSVKELLGITIMERSSFEKNPIDFLEAKGYKEVKKDLIIKLPKYSLFELENGRKRMLASAGELQKGNELALPSKYVNFLYLASHYEKLKGSPEDNEQKQLFVEQHKHYLDEIIEQISEFSKRVILADANLDKVLSAYNKHRDKPIREQAENIIHLFTLTNLGAPAAFKYFDTTIDRKRYTSTKEVLDATLIHQSITGLYETRIDLSQLGGDGGGGGEAAAKGGSGGIPWLMKKPLQLTTLVPLQEYEERLLKQTMLTGSYKEKLQSLFLKYDALWQHWENQVGHRRIKPHHIATGTVNPRPQKQYPINPKAKASIQTVINDLLKQGVLIQQNSIMNTPVYPVPKPDGKWRMVLDYREVNKTIPLIAAQNQHSAGILSSIFRGKYKTTLDLSNGFWAHSITPESYWLTAFTWLGQQYCWTRLPQGFLNSPALFNADVVDLLKEVPNVQVYVDDIYISHDDPREHLEQLEKVFSLLLNAGYVVSLKKSEIAQHEVEFLGFNITKEGRGLTETFKQKLLNITPPRDLKQLQSILGLLNFARNFIPNFSELVKPLYNIIATAPGKYITWTTDNSQQLQNIISMLNSAENLEERNPEVRLIMKVNTSPSAGYIRFYNEFAKRPIMYLNYVYTKAEVKFTNTEKLLTTIHKGLIKALDLGMGQEILVYSPIVSMTKIQKTPLPERKALPIRWITWMSYLEDPRIQFHYDKTLPELQQVPTVTDDIIAKIKHPSEFSMVFYTDGSAIKHPNVNKSHNAGMGIAQVQFKPEFTVINTWSIPLGDHTAQLAEVAAVEFACKKALKIDGPVLIVTDSFYVAESVNKELPYWQSNGFFNNKKKPLKHVSKWKSIADCIQLKPDIIIIHEKGHQPTASTFHTEGNNLADKLATQGSYVVNAGKRTADGSEFEKRTADGSEFESPKKKAKVE

SEQ ID NO: 6933 - protein, 2098 aa, synthetic construct
MPAAKRVKLDGGDKKYSIGLDIGTNSVGWAVITDEYKVPSKKFKVLGNTDRHSIKKNLIGALLFDSGETAEATRLKRTARRRYTRRKNRICYLQEIFSNEMAKVDDSFFHRLEESFLVEEDKKHERHPIFGNIVDEVAYHEKYPTIYHLRKKLVDSTDKADLRLIYLALAHMIKFRGHFLIEGDLNPDNSDVDKLFIQLVQTYNQLFEENPINASGVDAKAILSARLSKSRRLENLIAQLPGEKKNGLFGNLIALSLGLTPNFKSNFDLAEDAKLQLSKDTYDDDLDNLLAQIGDQYADLFLAAKNLSDAILLSDILRVNTEITKAPLSASMIKRYDEHHQDLTLLKALVRQQLPEKYKEIFFDQSKNGYAGYIDGGASQEEFYKFIKPILEKMDGTEELLVKLNREDLLRKQRTFDNGSIPHQIHLGELHAILRRQEDFYPFLKDNREKIEKILTFRIPYYVGPLARGNSRFAWMTRKSEETITPWNFEEVVDKGASAQSFIERMTNFDKNLPNEKVLPKHSLLYEYFTVYNELTKVKYVTEGMRKPAFLSGEQKKAIVDLLFKTNRKVTVKQLKEDYFKKIECFDSVEISGVEDRFNASLGTYHDLLKIIKDKDFLDNEENEDILEDIVLTLTLFEDREMIEERLKTYAHLFDDKVMKQLKRRRYTGWGRLSRKLINGIRDKQSGKTILDFLKSDGFANRNFMQLIHDDSLTFKEDIQKAQVSGQGDSLHEHIANLAGSPAIKKGILQTVKVVDELVKVMGRHKPENIVIEMARENQTTQKGQKNSRERMKRIEEGIKELGSQILKEHPVENTQLQNEKLYLYYLQNGRDMYVDQELDINRLSDYDVDHIVPQSFLKDDSIDNKVLTRSDKARGKSDNVPSEEVVKKMKNYWRQLLNAKLITQRKFDNLTKAERGGLSELDKAGFIKRQLVETRQITKHVAQILDSRMNTKYDENDKLIREVKVITLKSKLVSDFRKDFQFYKVREINNYHHAHDAYLNAVVGTALIKKYPKLESEFVYGDYKVYDVRKMIAKSEQEIGKATAKYFFYSNIMNFFKTEITLANGEIRKRPLIETNGETGEIVWDKGRDFATVRKVLSMPQVNIVKKTEVQTGGFSKESILPKRNSDKLIARKKDWDPKKYGGFDSPTVAYSVLVVAKVEKGKSKKLKSVKELLGITIMERSSFEKNPIDFLEAKGYKEVKKDLIIKLPKYSLFELENGRKRMLASAGELQKGNELALPSKYVNFLYLASHYEKLKGSPEDNEQKQLFVEQHKHYLDEIIEQISEFSKRVILADANLDKVLSAYNKHRDKPIREQAENIIHLFTLTNLGAPAAFKYFDTTIDRKRYTSTKEVLDATLIHQSITGLYETRIDLSQLGGDGGEAAAKGGSGGGGGTAPLEEEYRLFLEAPIQNVTLLEQWKREIPKVWAEINPPGLASTQAPIHVQLLSTALPVRVRQYPITLEAKRSLRETIRKFRAAGILRPVHSPWNTPLLPVRKSGTSEYRMVQDLREVNKRVETIHPTVPNPYTLLSLLPPDRIWYSVLDLKDAFFCIPLAPESQLIFAFEWADAEEGESGQLTWTRLPQGFKNSPTLFNEALNRDLQGFRLDHPSVSLLQYVDDLLIAADTQAACLSATRDLLMTLAELGYRVSGKKAQLCQEEVTYLGFKIHKGSRSLSNSRTQAILQIPVPKTKRQVREFLGTIGYCRLWIPGFAELAQPLYAATRPGNDPLVWGEKEEEAFQSLKLALTQPPALALPSLDKPFQLFVEETSGAAKGVLTQALGPWKRPVAYLSKRLDPVAAGWPRCLRAIAAAALLTREASKLTFGQDIEITSSHNLESLLRSPPDKWLTNARITQYQVLLLDPPRVRFKQTAALNPATLLPETDDTLPIHHCLDTLDSLTSTRPDLTDQPLAQAEATLFTDGSSYIRDGKRYAGAAVVTLDSVIWAEPLPIGTSAQKAELIALTKALEWSKDKSVNIYTDSRYAFATLHVHGMIYRERGWLTAGGKAIKNAPEILALLTAVWLPKRVAVMHCKGHQKDDAPTSTGNRRADEVAREVAIRPLSTQATISAGKRTADGSEFEKRTADGSEFESPKKKAKVE

SEQ ID NO: 6934 - protein, 2102 aa, synthetic construct
MPAAKRVKLDGGDKKYSIGLDIGTNSVGWAVITDEYKVPSKKFKVLGNTDRHSIKKNLIGALLFDSGETAEATRLKRTARRRYTRRKNRICYLQEIFSNEMAKVDDSFFHRLEESFLVEEDKKHERHPIFGNIVDEVAYHEKYPTIYHLRKKLVDSTDKADLRLIYLALAHMIKFRGHFLIEGDLNPDNSDVDKLFIQLVQTYNQLFEENPINASGVDAKAILSARLSKSRRLENLIAQLPGEKKNGLFGNLIALSLGLTPNFKSNFDLAEDAKLQLSKDTYDDDLDNLLAQIGDQYADLFLAAKNLSDAILLSDILRVNTEITKAPLSASMIKRYDEHHQDLTLLKALVRQQLPEKYKEIFFDQSKNGYAGYIDGGASQEEFYKFIKPILEKMDGTEELLVKLNREDLLRKQRTFDNGSIPHQIHLGELHAILRRQEDFYPFLKDNREKIEKILTFRIPYYVGPLARGNSRFAWMTRKSEETITPWNFEEVVDKGASAQSFIERMTNFDKNLPNEKVLPKHSLLYEYFTVYNELTKVKYVTEGMRKPAFLSGEQKKAIVDLLFKTNRKVTVKQLKEDYFKKIECFDSVEISGVEDRFNASLGTYHDLLKIIKDKDFLDNEENEDILEDIVLTLTLFEDREMIEERLKTYAHLFDDKVMKQLKRRRYTGWGRLSRKLINGIRDKQSGKTILDFLKSDGFANRNFMQLIHDDSLTFKEDIQKAQVSGQGDSLHEHIANLAGSPAIKKGILQTVKVVDELVKVMGRHKPENIVIEMARENQTTQKGQKNSRERMKRIEEGIKELGSQILKEHPVENTQLQNEKLYLYYLQNGRDMYVDQELDINRLSDYDVDHIVPQSFLKDDSIDNKVLTRSDKARGKSDNVPSEEVVKKMKNYWRQLLNAKLITQRKFDNLTKAERGGLSELDKAGFIKRQLVETRQITKHVAQILDSRMNTKYDENDKLIREVKVITLKSKLVSDFRKDFQFYKVREINNYHHAHDAYLNAVVGTALIKKYPKLESEFVYGDYKVYDVRKMIAKSEQEIGKATAKYFFYSNIMNFFKTEITLANGEIRKRPLIETNGETGEIVWDKGRDFATVRKVLSMPQVNIVKKTEVQTGGFSKESILPKRNSDKLIARKKDWDPKKYGGFDSPTVAYSVLVVAKVEKGKSKKLKSVKELLGITIMERSSFEKNPIDFLEAKGYKEVKKDLIIKLPKYSLFELENGRKRMLASAGELQKGNELALPSKYVNFLYLASHYEKLKGSPEDNEQKQLFVEQHKHYLDEIIEQISEFSKRVILADANLDKVLSAYNKHRDKPIREQAENIIHLFTLTNLGAPAAFKYFDTTIDRKRYTSTKEVLDATLIHQSITGLYETRIDLSQLGGDGGEAAAKGGSGGGGGTVSLQDEHRLFDIPVTTSLPDVWLQDFPQAWAETGGLGRAKCQAPIIIDLKPTAVPVSIKQYPMSLEAHMGIRQHIIKFLELGVLRPCRSPWNTPLLPVKKPGTQDYRPVQDLREINKRTVDIHPTVPNPYNLLSTLKPDYSWYTVLDLKDAFFCLPLAPQSQELFAFEWKDPERGISGQLTWTRLPQGFKNSPTLFDEALHRDLTDFRTQHPEVTLLQYVDDLLLAAPTKKACTQGTRHLLQELGEKGYRASAKKAQICQTKVTYLGYILSEGKRWLTPGRIETVARIPPPRNPREVREFLGTAGFCRLWIPGFAELAAPLYALTKESTPFTWQTEHQLAFEALKKALLSAPALGLPDTSKPFTLFLDERQGIAKGVLTQKLGPWKRPVAYLSKKLDPVAAGWPPCLRIMAATAMLVKDSAKLTLGQPLTVITPHTLEAIVRQPPDRWITNARLTHYQALLLDTDRVQFGPPVTLNPATLLPVPENQPSPHDCRQVLAETHGTREDLKDQELPDADHTWYTDGSSYLDSGTRRAGAAVVDGHNTIWAQSLPPGTSAQKAELIALTKALELSKGKKANIYTDSRYAFATAHTHGSIYERRGLLTSEGKEIKNKAEIIALLKALFLPQEVAIIHCPGHQKGQDPVAVGNRQADRVARQAAMAEVLTLATEPDNTSHITAGKRTADGSEFEKRTADGSEFESPKKKAKVE

SEQ ID NO: 6935 - protein, 2102 aa, synthetic construct
MPAAKRVKLDGGDKKYSIGLDIGTNSVGWAVITDEYKVPSKKFKVLGNTDRHSIKKNLIGALLFDSGETAEATRLKRTARRRYTRRKNRICYLQEIFSNEMAKVDDSFFHRLEESFLVEEDKKHERHPIFGNIVDEVAYHEKYPTIYHLRKKLVDSTDKADLRLIYLALAHMIKFRGHFLIEGDLNPDNSDVDKLFIQLVQTYNQLFEENPINASGVDAKAILSARLSKSRRLENLIAQLPGEKKNGLFGNLIALSLGLTPNFKSNFDLAEDAKLQLSKDTYDDDLDNLLAQIGDQYADLFLAAKNLSDAILLSDILRVNTEITKAPLSASMIKRYDEHHQDLTLLKALVRQQLPEKYKEIFFDQSKNGYAGYIDGGASQEEFYKFIKPILEKMDGTEELLVKLNREDLLRKQRTFDNGSIPHQIHLGELHAILRRQEDFYPFLKDNREKIEKILTFRIPYYVGPLARGNSRFAWMTRKSEETITPWNFEEVVDKGASAQSFIERMTNFDKNLPNEKVLPKHSLLYEYFTVYNELTKVKYVTEGMRKPAFLSGEQKKAIVDLLFKTNRKVTVKQLKEDYFKKIECFDSVEISGVEDRFNASLGTYHDLLKIIKDKDFLDNEENEDILEDIVLTLTLFEDREMIEERLKTYAHLFDDKVMKQLKRRRYTGWGRLSRKLINGIRDKQSGKTILDFLKSDGFANRNFMQLIHDDSLTFKEDIQKAQVSGQGDSLHEHIANLAGSPAIKKGILQTVKVVDELVKVMGRHKPENIVIEMARENQTTQKGQKNSRERMKRIEEGIKELGSQILKEHPVENTQLQNEKLYLYYLQNGRDMYVDQELDINRLSDYDVDHIVPQSFLKDDSIDNKVLTRSDKARGKSDNVPSEEVVKKMKNYWRQLLNAKLITQRKFDNLTKAERGGLSELDKAGFIKRQLVETRQITKHVAQILDSRMNTKYDENDKLIREVKVITLKSKLVSDFRKDFQFYKVREINNYHHAHDAYLNAVVGTALIKKYPKLESEFVYGDYKVYDVRKMIAKSEQEIGKATAKYFFYSNIMNFFKTEITLANGEIRKRPLIETNGETGEIVWDKGRDFATVRKVLSMPQVNIVKKTEVQTGGFSKESILPKRNSDKLIARKKDWDPKKYGGFDSPTVAYSVLVVAKVEKGKSKKLKSVKELLGITIMERSSFEKNPIDFLEAKGYKEVKKDLIIKLPKYSLFELENGRKRMLASAGELQKGNELALPSKYVNFLYLASHYEKLKGSPEDNEQKQLFVEQHKHYLDEIIEQISEFSKRVILADANLDKVLSAYNKHRDKPIREQAENIIHLFTLTNLGAPAAFKYFDTTIDRKRYTSTKEVLDATLIHQSITGLYETRIDLSQLGGDGGEAAAKGGSGGGGGTVSLQDEHRLFDIPVTTSLPDVWLQDFPQAWAETGGLGRAKCQAPIIIDLKPTAVPVSIKQYPMSLEAHMGIRQHIIKFLELGVLRPCRSPWNTPLLPVKKPGTQDYRPVQDLREINKRTVDIHPTVPNPYNLLSTLKPDYSWYTVLDLKDAFFCLPLAPQSQELFAFEWKDPERGISGQLTWTRLPQGFKNSPTLFNEALHRDLTDFRTQHPEVTLLQYVDDLLLAAPTKKACTQGTRHLLQELGEKGYRASAKKAQICQTKVTYLGYILSEGKRWLTPGRIETVARIPPPRNPREVREFLGTAGFCRLWIPGFAELAAPLYALTKPSTPFTWQTEHQLAFEALKKALLSAPALGLPDTSKPFTLFLDERQGIAKGVLTQKLGPWKRPVAYLSKKLDPVAAGWPPCLRIMAATAMLVKDSAKLTLGQPLTVITPHTLEAIVRQPPDRWITNARLTHYQALLLDTDRVQFGPPVTLNPATLLPVPENQPSPHDCRQVLAETHGTREDLKDQELPDADHTWYTDGSSYLDSGTRRAGAAVVDGHNTIWAQSLPPGTSAQKAELIALTKALELSKGKKANIYTDSRYAFATAHTHGSIYERRGWLTSEGKEIKNKAEIIALLKALFLPQEVAIIHCPGHQKGQDPVAVGNRQADRVARQAAMAEVLTLATEPDNTSHITAGKRTADGSEFEKRTADGSEFESPKKKAKVE

SEQ ID NO: 6936 - protein, 2087 aa, synthetic construct
MPAAKRVKLDGGDKKYSIGLDIGTNSVGWAVITDEYKVPSKKFKVLGNTDRHSIKKNLIGALLFDSGETAEATRLKRTARRRYTRRKNRICYLQEIFSNEMAKVDDSFFHRLEESFLVEEDKKHERHPIFGNIVDEVAYHEKYPTIYHLRKKLVDSTDKADLRLIYLALAHMIKFRGHFLIEGDLNPDNSDVDKLFIQLVQTYNQLFEENPINASGVDAKAILSARLSKSRRLENLIAQLPGEKKNGLFGNLIALSLGLTPNFKSNFDLAEDAKLQLSKDTYDDDLDNLLAQIGDQYADLFLAAKNLSDAILLSDILRVNTEITKAPLSASMIKRYDEHHQDLTLLKALVRQQLPEKYKEIFFDQSKNGYAGYIDGGASQEEFYKFIKPILEKMDGTEELLVKLNREDLLRKQRTFDNGSIPHQIHLGELHAILRRQEDFYPFLKDNREKIEKILTFRIPYYVGPLARGNSRFAWMTRKSEETITPWNFEEVVDKGASAQSFIERMTNFDKNLPNEKVLPKHSLLYEYFTVYNELTKVKYVTEGMRKPAFLSGEQKKAIVDLLFKTNRKVTVKQLKEDYFKKIECFDSVEISGVEDRFNASLGTYHDLLKIIKDKDFLDNEENEDILEDIVLTLTLFEDREMIEERLKTYAHLFDDKVMKQLKRRRYTGWGRLSRKLINGIRDKQSGKTILDFLKSDGFANRNFMQLIHDDSLTFKEDIQKAQVSGQGDSLHEHIANLAGSPAIKKGILQTVKVVDELVKVMGRHKPENIVIEMARENQTTQKGQKNSRERMKRIEEGIKELGSQILKEHPVENTQLQNEKLYLYYLQNGRDMYVDQELDINRLSDYDVDHIVPQSFLKDDSIDNKVLTRSDKARGKSDNVPSEEVVKKMKNYWRQLLNAKLITQRKFDNLTKAERGGLSELDKAGFIKRQLVETRQITKHVAQILDSRMNTKYDENDKLIREVKVITLKSKLVSDFRKDFQFYKVREINNYHHAHDAYLNAVVGTALIKKYPKLESEFVYGDYKVYDVRKMIAKSEQEIGKATAKYFFYSNIMNFFKTEITLANGEIRKRPLIETNGETGEIVWDKGRDFATVRKVLSMPQVNIVKKTEVQTGGFSKESILPKRNSDKLIARKKDWDPKKYGGFDSPTVAYSVLVVAKVEKGKSKKLKSVKELLGITIMERSSFEKNPIDFLEAKGYKEVKKDLIIKLPKYSLFELENGRKRMLASAGELQKGNELALPSKYVNFLYLASHYEKLKGSPEDNEQKQLFVEQHKHYLDEIIEQISEFSKRVILADANLDKVLSAYNKHRDKPIREQAENIIHLFTLTNLGAPAAFKYFDTTIDRKRYTSTKEVLDATLIHQSITGLYETRIDLSQLGGDGGEAAAKGGSGGGGGVPWILKKPLELTIKLDLEEQQGTLLNNSILSKKGKEELKQLFEKYSALWQSWENQVGHRRIRPHKIATGTVKPTPQKQYHINPKAKPDIQIVINDLLKQGVLIQKESTMNTPVYPVPKPNGRWRMVLDYRAVNKVTPLIAVQNQHSYGILGSLFKGRYKTTIDLSNGFWAHPIVPEDYWITAFTWQGKQYCWTVLPQGFLNSPGLFTGDVVDLLQGIPNVEVYVDDVYISHDSEKEHLEYLDILFNRLKEAGYIISLKKSNIANSIVDFLGFQITNEGRGLTDTFKEKLENITAPTTLKQLQSILGLLNFARNFIPDFTELIAPLYALIPKSTKNYVPWQIEHSTTLETLITKLNGAEYLQGRKGDKTLIMKVNASYTTGYIRYYNEGEKKPISYVSIVFSKTELKFTELEKLLTTVHKGLLKALDLSMGQNIHVYSPIVSMQNIQKTPQTAKKALASRWLSWLSYLEDPRIRFFYDPQMPALKDLPAVDTGKDNKKHPSNFQHIFYTDGSAITSPTKEGHLNAGMGIVYFINKDGNLQKQQEWSISLGNHTAQFAEIAAFEFALKKCLPLGGNILVVTDSNYVAKAYNEELDVWASNGFVNNRKKPLKHISKWKSVADLKRLRPDVVVTHEPGHQKLDSSPHAYGNNLADQLATQASFKVHAGKRTADGSEFEKRTADGSEFESPKKKAKVE

SEQ ID NO: 6937 - protein, 2173 aa, synthetic construct
MPAAKRVKLDGGDKKYSIGLDIGTNSVGWAVITDEYKVPSKKFKVLGNTDRHSIKKNLIGALLFDSGETAEATRLKRTARRRYTRRKNRICYLQEIFSNEMAKVDDSFFHRLEESFLVEEDKKHERHPIFGNIVDEVAYHEKYPTIYHLRKKLVDSTDKADLRLIYLALAHMIKFRGHFLIEGDLNPDNSDVDKLFIQLVQTYNQLFEENPINASGVDAKAILSARLSKSRRLENLIAQLPGEKKNGLFGNLIALSLGLTPNFKSNFDLAEDAKLQLSKDTYDDDLDNLLAQIGDQYADLFLAAKNLSDAILLSDILRVNTEITKAPLSASMIKRYDEHHQDLTLLKALVRQQLPEKYKEIFFDQSKNGYAGYIDGGASQEEFYKFIKPILEKMDGTEELLVKLNREDLLRKQRTFDNGSIPHQIHLGELHAILRRQEDFYPFLKDNREKIEKILTFRIPYYVGPLARGNSRFAWMTRKSEETITPWNFEEVVDKGASAQSFIERMTNFDKNLPNEKVLPKHSLLYEYFTVYNELTKVKYVTEGMRKPAFLSGEQKKAIVDLLFKTNRKVTVKQLKEDYFKKIECFDSVEISGVEDRFNASLGTYHDLLKIIKDKDFLDNEENEDILEDIVLTLTLFEDREMIEERLKTYAHLFDDKVMKQLKRRRYTGWGRLSRKLINGIRDKQSGKTILDFLKSDGFANRNFMQLIHDDSLTFKEDIQKAQVSGQGDSLHEHIANLAGSPAIKKGILQTVKVVDELVKVMGRHKPENIVIEMARENQTTQKGQKNSRERMKRIEEGIKELGSQILKEHPVENTQLQNEKLYLYYLQNGRDMYVDQELDINRLSDYDVDHIVPQSFLKDDSIDNKVLTRSDKARGKSDNVPSEEVVKKMKNYWRQLLNAKLITQRKFDNLTKAERGGLSELDKAGFIKRQLVETRQITKHVAQILDSRMNTKYDENDKLIREVKVITLKSKLVSDFRKDFQFYKVREINNYHHAHDAYLNAVVGTALIKKYPKLESEFVYGDYKVYDVRKMIAKSEQEIGKATAKYFFYSNIMNFFKTEITLANGEIRKRPLIETNGETGEIVWDKGRDFATVRKVLSMPQVNIVKKTEVQTGGFSKESILPKRNSDKLIARKKDWDPKKYGGFDSPTVAYSVLVVAKVEKGKSKKLKSVKELLGITIMERSSFEKNPIDFLEAKGYKEVKKDLIIKLPKYSLFELENGRKRMLASAGELQKGNELALPSKYVNFLYLASHYEKLKGSPEDNEQKQLFVEQHKHYLDEIIEQISEFSKRVILADANLDKVLSAYNKHRDKPIREQAENIIHLFTLTNLGAPAAFKYFDTTIDRKRYTSTKEVLDATLIHQSITGLYETRIDLSQLGGDGGEAAAKGGSGGGGGMDLLKPLTVERKGVKIKGYWNSQADITCVPKDLLQGEEPVRQQNVTTIHGTQEGDVYYVNLKIDGRRINTEVIGTTLDYAIITPGDVPWILKKPLELTIKLDLEEQQGTLLNNSILSKKGKEELKQLFEKYSALWQSWENQVGHRRIRPHKIATGTVKPTPQKQYHINPKAKPDIQIVINDLLKQGVLIQKESTMNTPVYPVPKPNGRWRMVLDYRAVNKVTPLIAVQNQHSYGILGSLFKGRYKTTIDLSNGFWAHPIVPEDYWITAFTWQGKQYCWTVLPQGFLNSPGLFNGDVVDLLQGIPNVEVYVDDVYISHDSEKEHLEYLDILFNRLKEAGYIISLKKSNIANSIVDFLGFQITNEGRGLTDTFKEKLENITAPTTLKQLQSILGKLNFARNFIPDFTELIAPLYALIPKSPKNYVPWQIEHSTTLETLITKLNGAEYLQGRKGDKTLIMKVNASYTTGYIRYYNEGEKKPISYVSIVFSKTELKFTELEKLLTTVHKGLLKALDLSMGQNIHVYSPIVSMQNIQKTPQTAKKALASRWLSWLSYLEDPRIRFFYDPQMPALKDLPAVDTGKDNKKHPSNFQHIFYTDGSAITSPTKEGHLNAGMGIVYFINKDGNLQKQQEWSISLGNHTAQFAEIAAFEFALKKCLPLGGNILVVTDSNYVAKAYNEELDVWASNGFVNNRKKPLKHISKWKSVADLKRLRPDVVVTHEPGHQKLDSSPHAYGNNLADQLATQASFKVHAGKRTADGSEFEKRTADGSEFESPKKKAKVE

SEQ ID NO: 6938 - protein, 2095 aa, synthetic construct
MPAAKRVKLDGGDKKYSIGLDIGTNSVGWAVITDEYKVPSKKFKVLGNTDRHSIKKNLIGALLFDSGETAEATRLKRTARRRYTRRKNRICYLQEIFSNEMAKVDDSFFHRLEESFLVEEDKKHERHPIFGNIVDEVAYHEKYPTIYHLRKKLVDSTDKADLRLIYLALAHMIKFRGHFLIEGDLNPDNSDVDKLFIQLVQTYNQLFEENPINASGVDAKAILSARLSKSRRLENLIAQLPGEKKNGLFGNLIALSLGLTPNFKSNFDLAEDAKLQLSKDTYDDDLDNLLAQIGDQYADLFLAAKNLSDAILLSDILRVNTEITKAPLSASMIKRYDEHHQDLTLLKALVRQQLPEKYKEIFFDQSKNGYAGYIDGGASQEEFYKFIKPILEKMDGTEELLVKLNREDLLRKQRTFDNGSIPHQIHLGELHAILRRQEDFYPFLKDNREKIEKILTFRIPYYVGPLARGNSRFAWMTRKSEETITPWNFEEVVDKGASAQSFIERMTNFDKNLPNEKVLPKHSLLYEYFTVYNELTKVKYVTEGMRKPAFLSGEQKKAIVDLLFKTNRKVTVKQLKEDYFKKIECFDSVEISGVEDRFNASLGTYHDLLKIIKDKDFLDNEENEDILEDIVLTLTLFEDREMIEERLKTYAHLFDDKVMKQLKRRRYTGWGRLSRKLINGIRDKQSGKTILDFLKSDGFANRNFMQLIHDDSLTFKEDIQKAQVSGQGDSLHEHIANLAGSPAIKKGILQTVKVVDELVKVMGRHKPENIVIEMARENQTTQKGQKNSRERMKRIEEGIKELGSQILKEHPVENTQLQNEKLYLYYLQNGRDMYVDQELDINRLSDYDVDHIVPQSFLKDDSIDNKVLTRSDKARGKSDNVPSEEVVKKMKNYWRQLLNAKLITQRKFDNLTKAERGGLSELDKAGFIKRQLVETRQITKHVAQILDSRMNTKYDENDKLIREVKVITLKSKLVSDFRKDFQFYKVREINNYHHAHDAYLNAVVGTALIKKYPKLESEFVYGDYKVYDVRKMIAKSEQEIGKATAKYFFYSNIMNFFKTEITLANGEIRKRPLIETNGETGEIVWDKGRDFATVRKVLSMPQVNIVKKTEVQTGGFSKESILPKRNSDKLIARKKDWDPKKYGGFDSPTVAYSVLVVAKVEKGKSKKLKSVKELLGITIMERSSFEKNPIDFLEAKGYKEVKKDLIIKLPKYSLFELENGRKRMLASAGELQKGNELALPSKYVNFLYLASHYEKLKGSPEDNEQKQLFVEQHKHYLDEIIEQISEFSKRVILADANLDKVLSAYNKHRDKPIREQAENIIHLFTLTNLGAPAAFKYFDTTIDRKRYTSTKEVLDATLIHQSITGLYETRIDLSQLGGDGGEAAAKGGSGGGGGTLQLEEEYRLFEPESTQKQEMDIWLKNFPQAWAETGGMGTAHCQAPVLIQLKATATPISIRQYPMPHEAYQGIKPHIRRMLDQGILKPCQSPWNTPLLPVKKPGTEDYRPVQDLREVNKRVEDIHPTVPNPYNLLSTLPPSHPWYTVLDLKDAFFCLRLHSESQLLFAFEWRDPEIGLSGQLTWTRLPQGFKNSPTLFNEALHSDLADFRVRYPALVLLQYVDDLLLAAATRTECLEGTKALLETLGNKGYRASAKKAQICLQEVTYLGYSLKDGQRWLTKARKEAILSIPVPKNSRQVREFLGTAGYCRLWIPGFAELAAPLYPLTRPGTLFQWGTEQQLAFEDIKKALLSSPALGLPDITKPFELFIDENSGFAKGVLVQKLGPWKRPVAYLSKKLDTVASGWPPCLRMVAAIAILVKDAGKLTLGQPLTILTSHPVEALVRQPPNKWLSNARMTHYQAMLLDAERVHFGPTVSLNPATLLPLPSGGNHHDCLQILAETHGTRPDLTDQPLPDADLTWYTDGSSFIRNGEREAGAAVTTESEVIWAAPLPPGTSAQRAELIALTQALKMAEGKKLTVYTDSRYAFATTHVHGEIYRRRGWLTSEGKEIKNKNEILALLEALFLPKRLSIIHCPGHQKGDSPQAKGNRLADDTAKKAATETHSSLTVLPAGKRTADGSEFEKRTADGSEFESPKKKAKVE

SEQ ID NO: 6939 - protein, 2176 aa, synthetic construct
MPAAKRVKLDGGDKKYSIGLDIGTNSVGWAVITDEYKVPSKKFKVLGNTDRHSIKKNLIGALLFDSGETAEATRLKRTARRRYTRRKNRICYLQEIFSNEMAKVDDSFFHRLEESFLVEEDKKHERHPIFGNIVDEVAYHEKYPTIYHLRKKLVDSTDKADLRLIYLALAHMIKFRGHFLIEGDLNPDNSDVDKLFIQLVQTYNQLFEENPINASGVDAKAILSARLSKSRRLENLIAQLPGEKKNGLFGNLIALSLGLTPNFKSNFDLAEDAKLQLSKDTYDDDLDNLLAQIGDQYADLFLAAKNLSDAILLSDILRVNTEITKAPLSASMIKRYDEHHQDLTLLKALVRQQLPEKYKEIFFDQSKNGYAGYIDGGASQEEFYKFIKPILEKMDGTEELLVKLNREDLLRKQRTFDNGSIPHQIHLGELHAILRRQEDFYPFLKDNREKIEKILTFRIPYYVGPLARGNSRFAWMTRKSEETITPWNFEEVVDKGASAQSFIERMTNFDKNLPNEKVLPKHSLLYEYFTVYNELTKVKYVTEGMRKPAFLSGEQKKAIVDLLFKTNRKVTVKQLKEDYFKKIECFDSVEISGVEDRFNASLGTYHDLLKIIKDKDFLDNEENEDILEDIVLTLTLFEDREMIEERLKTYAHLFDDKVMKQLKRRRYTGWGRLSRKLINGIRDKQSGKTILDFLKSDGFANRNFMQLIHDDSLTFKEDIQKAQVSGQGDSLHEHIANLAGSPAIKKGILQTVKVVDELVKVMGRHKPENIVIEMARENQTTQKGQKNSRERMKRIEEGIKELGSQILKEHPVENTQLQNEKLYLYYLQNGRDMYVDQELDINRLSDYDVDHIVPQSFLKDDSIDNKVLTRSDKARGKSDNVPSEEVVKKMKNYWRQLLNAKLITQRKFDNLTKAERGGLSELDKAGFIKRQLVETRQITKHVAQILDSRMNTKYDENDKLIREVKVITLKSKLVSDFRKDFQFYKVREINNYHHAHDAYLNAVVGTALIKKYPKLESEFVYGDYKVYDVRKMIAKSEQEIGKATAKYFFYSNIMNFFKTEITLANGEIRKRPLIETNGETGEIVWDKGRDFATVRKVLSMPQVNIVKKTEVQTGGFSKESILPKRNSDKLIARKKDWDPKKYGGFDSPTVAYSVLVVAKVEKGKSKKLKSVKELLGITIMERSSFEKNPIDFLEAKGYKEVKKDLIIKLPKYSLFELENGRKRMLASAGELQKGNELALPSKYVNFLYLASHYEKLKGSPEDNEQKQLFVEQHKHYLDEIIEQISEFSKRVILADANLDKVLSAYNKHRDKPIREQAENIIHLFTLTNLGAPAAFKYFDTTIDRKRYTSTKEVLDATLIHQSITGLYETRIDLSQLGGDGGEAAAKGGSGGGGGMNPLQLLQPLPAEIKGTKLLAHWNSGATITCIPESFLEDEQPIKKTLIKTIHGEKQQNVYYVTFKVKGRKVEAEVIASPYEYILLSPTDVPWLTQQPLQLTILVPLQEYQEKILSKTALPEDQKQQLKTLFVKYDNLWQHWENQVGHRKIRPHNIATGDYPPRPQKQYPINPKAKPSIQIVIDDLLKQGVLTPQNSTMNTPVYPVPKPDGRWRMVLDYREVNKTIPLTAAQNQHSAGILATIVRQKYKTTLDLANGFWAHPITPESYWLTAFTWQGKQYCWTRLPQGFLNSPALFNADVVDLLKEIPNVQVYVDDIYLSHDDPKEHVQQLEKVFQILLQAGYVVSLKKSEIGQKTVEFLGFNITKEGRGLTDTFKTKLLNITPPKDLKQLQSILGKLNFARNFIPNFAELVQPLYNLIAPAKGKYIEWSEENTKQLNMVIEALNTASNLEERLPEQRLVIKVNTSPSAGYVRYYNETGKKPIMYLNYVFSKAELKFSMLEKLLTTMHKALIKAMDLAMGQEILVYSPIVSMTKIQKTPLPERKALPIRWITWMTYLEDPRIQFHYDKTLPELKHIPDVYTSSQSPVKHPSQYEGVFYTDGSAIKSPDPTKSNNAGMGIVHATYKPEYQVLNQWSIPLGNHTAQMAEIAAVEFACKKALKIPGPVLVITDSFYVAESANKELPYWKSNGFVNNKKKPLKHISKWKSIAECLSMKPDITIQHEKGISLQIPVFILKGNALADKLATQGSYVVNAGKRTADGSEFEKRTADGSEFESPKKKAKVE

SEQ ID NO: 6940 - protein, 2094 aa, synthetic construct
MPAAKRVKLDGGDKKYSIGLDIGTNSVGWAVITDEYKVPSKKFKVLGNTDRHSIKKNLIGALLFDSGETAEATRLKRTARRRYTRRKNRICYLQEIFSNEMAKVDDSFFHRLEESFLVEEDKKHERHPIFGNIVDEVAYHEKYPTIYHLRKKLVDSTDKADLRLIYLALAHMIKFRGHFLIEGDLNPDNSDVDKLFIQLVQTYNQLFEENPINASGVDAKAILSARLSKSRRLENLIAQLPGEKKNGLFGNLIALSLGLTPNFKSNFDLAEDAKLQLSKDTYDDDLDNLLAQIGDQYADLFLAAKNLSDAILLSDILRVNTEITKAPLSASMIKRYDEHHQDLTLLKALVRQQLPEKYKEIFFDQSKNGYAGYIDGGASQEEFYKFIKPILEKMDGTEELLVKLNREDLLRKQRTFDNGSIPHQIHLGELHAILRRQEDFYPFLKDNREKIEKILTFRIPYYVGPLARGNSRFAWMTRKSEETITPWNFEEVVDKGASAQSFIERMTNFDKNLPNEKVLPKHSLLYEYFTVYNELTKVKYVTEGMRKPAFLSGEQKKAIVDLLFKTNRKVTVKQLKEDYFKKIECFDSVEISGVEDRFNASLGTYHDLLKIIKDKDFLDNEENEDILEDIVLTLTLFEDREMIEERLKTYAHLFDDKVMKQLKRRRYTGWGRLSRKLINGIRDKQSGKTILDFLKSDGFANRNFMQLIHDDSLTFKEDIQKAQVSGQGDSLHEHIANLAGSPAIKKGILQTVKVVDELVKVMGRHKPENIVIEMARENQTTQKGQKNSRERMKRIEEGIKELGSQILKEHPVENTQLQNEKLYLYYLQNGRDMYVDQELDINRLSDYDVDHIVPQSFLKDDSIDNKVLTRSDKARGKSDNVPSEEVVKKMKNYWRQLLNAKLITQRKFDNLTKAERGGLSELDKAGFIKRQLVETRQITKHVAQILDSRMNTKYDENDKLIREVKVITLKSKLVSDFRKDFQFYKVREINNYHHAHDAYLNAVVGTALIKKYPKLESEFVYGDYKVYDVRKMIAKSEQEIGKATAKYFFYSNIMNFFKTEITLANGEIRKRPLIETNGETGEIVWDKGRDFATVRKVLSMPQVNIVKKTEVQTGGFSKESILPKRNSDKLIARKKDWDPKKYGGFDSPTVAYSVLVVAKVEKGKSKKLKSVKELLGITIMERSSFEKNPIDFLEAKGYKEVKKDLIIKLPKYSLFELENGRKRMLASAGELQKGNELALPSKYVNFLYLASHYEKLKGSPEDNEQKQLFVEQHKHYLDEIIEQISEFSKRVILADANLDKVLSAYNKHRDKPIREQAENIIHLFTLTNLGAPAAFKYFDTTIDRKRYTSTKEVLDATLIHQSITGLYETRIDLSQLGGDGGEAAAKGGSGGGGGVLNLEEEYRLHEKPVPSSIDPSWLQLFPTVWAERAGMGLANQVPPVVVELRSGASPVAVRQYPMSKEAREGIRPHIQKFLDLGVLVPCRSPWNTPLLPVKKPGTNDYRPVQDLREINKRVQDIHPTVPNPYNLLSSLPPSYTWYSVLDLKDAFFCLRLHPNSQPLFAFEWKDPEKGNTGQLTWTRLPQGFKNSPTLFNEALHRDLAPFRALNPQVVLLQYVDDLLVAAPTYEDCKKGTQKLLQELSKLGYRVSAKKAQLCQREVTYLGYLLKEGKRWLTPARKATVMKIPVPTTPRQVREFLGKAGFCRLFIPGFASLAAPLYPLTKPSIPFIWTEEHQQAFDHIKKALLSAPALALPDLTKPFTLYIDERAGVARGVLTQTLGPWRRPVAYLSKKLDPVASGWPTCLKAVAAVALLLKDADKLTLGQNVTVIASHSLESIVRQPPDRWMTNARMTHYQSLLLNERVSFAPPAVLNPATLLPVESEATPVHRCSEILAEETGTRRDLEDQPLPGVPTWYTDGSSFITEGKRRAGAPIVDGKRTVWASSLPEGTSAQKAELVALTQALRLAEGKNINIYTDSRYAFATAHIHGAIYKQRGWLTSAGKDIKNKEEILALLEAIHLPRRVAIIHCPGHQRGSNPVATGNRRADEAAKQAALSTRVLAGTTKPAGKRTADGSEFEKRTADGSEFESPKKKAKVE

SEQ ID NO: 6941 - protein, 2218 aa, synthetic construct
MPAAKRVKLDGGDKKYSIGLDIGTNSVGWAVITDEYKVPSKKFKVLGNTDRHSIKKNLIGALLFDSGETAEATRLKRTARRRYTRRKNRICYLQEIFSNEMAKVDDSFFHRLEESFLVEEDKKHERHPIFGNIVDEVAYHEKYPTIYHLRKKLVDSTDKADLRLIYLALAHMIKFRGHFLIEGDLNPDNSDVDKLFIQLVQTYNQLFEENPINASGVDAKAILSARLSKSRRLENLIAQLPGEKKNGLFGNLIALSLGLTPNFKSNFDLAEDAKLQLSKDTYDDDLDNLLAQIGDQYADLFLAAKNLSDAILLSDILRVNTEITKAPLSASMIKRYDEHHQDLTLLKALVRQQLPEKYKEIFFDQSKNGYAGYIDGGASQEEFYKFIKPILEKMDGTEELLVKLNREDLLRKQRTFDNGSIPHQIHLGELHAILRRQEDFYPFLKDNREKIEKILTFRIPYYVGPLARGNSRFAWMTRKSEETITPWNFEEVVDKGASAQSFIERMTNFDKNLPNEKVLPKHSLLYEYFTVYNELTKVKYVTEGMRKPAFLSGEQKKAIVDLLFKTNRKVTVKQLKEDYFKKIECFDSVEISGVEDRFNASLGTYHDLLKIIKDKDFLDNEENEDILEDIVLTLTLFEDREMIEERLKTYAHLFDDKVMKQLKRRRYTGWGRLSRKLINGIRDKQSGKTILDFLKSDGFANRNFMQLIHDDSLTFKEDIQKAQVSGQGDSLHEHIANLAGSPAIKKGILQTVKVVDELVKVMGRHKPENIVIEMARENQTTQKGQKNSRERMKRIEEGIKELGSQILKEHPVENTQLQNEKLYLYYLQNGRDMYVDQELDINRLSDYDVDHIVPQSFLKDDSIDNKVLTRSDKARGKSDNVPSEEVVKKMKNYWRQLLNAKLITQRKFDNLTKAERGGLSELDKAGFIKRQLVETRQITKHVAQILDSRMNTKYDENDKLIREVKVITLKSKLVSDFRKDFQFYKVREINNYHHAHDAYLNAVVGTALIKKYPKLESEFVYGDYKVYDVRKMIAKSEQEIGKATAKYFFYSNIMNFFKTEITLANGEIRKRPLIETNGETGEIVWDKGRDFATVRKVLSMPQVNIVKKTEVQTGGFSKESILPKRNSDKLIARKKDWDPKKYGGFDSPTVAYSVLVVAKVEKGKSKKLKSVKELLGITIMERSSFEKNPIDFLEAKGYKEVKKDLIIKLPKYSLFELENGRKRMLASAGELQKGNELALPSKYVNFLYLASHYEKLKGSPEDNEQKQLFVEQHKHYLDEIIEQISEFSKRVILADANLDKVLSAYNKHRDKPIREQAENIIHLFTLTNLGAPAAFKYFDTTIDRKRYTSTKEVLDATLIHQSITGLYETRIDLSQLGGDGGEAAAKGGSGGGGGTLGDQGSRGSDPLPEPRVTLTVEGIPTEFLVNTGAEHSVLTKPMGKMGSKRTVVAGATGSKVYPWTTKRLLKIGQKQVTHSFLVIPECPAPLLGRDLLTKLKAQIQFSTEGPQVTWEDRPAMCLVLNLEEEYRLHEKPVPPSIDPSWLQLFPMVWAEKAGMGLANQVPPVVVELKSDASPVAVRQYPMSKEAREGIRPHIQRFLDLGILVPCQSPWNTPLLPVKKPGTNDYRPVQDLREVNKRVQDIHPTVPNPYNLLSSLPPSHTWYSVLDLKDAFFCLKLHPNSQPLFAFEWRDPEKGNTGQLTWTRLPQGFKNSPTLFDEALHRDLASFRALNPQVVMLQYVDDLLVAAPTYRDCKEGTRRLLQELSKLGYRVSAKKAQLCREEVTYLGYLLKGGKRWLTPARKATVMKIPTPTTPRQVREFLGTAGFCRLWIPGFASLAAPLYPLTREKVPFTWTEAHQEAFGRIKEALLSAPALALPDLTKPFALYVDEKEGVARGVLTQTLGPWRRPVAYLSKKLDPVASGWPTCLKAIAAVALLLKDADKLTLGQNVLVIAPHNLESIVRQPPDRWMTNARMTHYQSLLLNERVSFAPPAILNPATLLPVESDDTPIHICSEILAEETGTRPDLRDQPLPGVPAWYTDGSSFIMDGRRQAGAAIVDNKRTVWASNLPEGTSAQKAELIALTQALRLAEGKSINIYTDSRYAFATAHVHGAIYKQRGLLTSAGKDIKNKEEILALLEAIHLPKRVAIIHCPGHQRGTDPVATGNRKADEAAKQAAQSTRILTETTKNAGKRTADGSEFEKRTADGSEFESPKKKAKVE

SEQ ID NO: 6942 - protein, 2127 aa, synthetic construct
MPAAKRVKLDGGDKKYSIGLDIGTNSVGWAVITDEYKVPSKKFKVLGNTDRHSIKKNLIGALLFDSGETAEATRLKRTARRRYTRRKNRICYLQEIFSNEMAKVDDSFFHRLEESFLVEEDKKHERHPIFGNIVDEVAYHEKYPTIYHLRKKLVDSTDKADLRLIYLALAHMIKFRGHFLIEGDLNPDNSDVDKLFIQLVQTYNQLFEENPINASGVDAKAILSARLSKSRRLENLIAQLPGEKKNGLFGNLIALSLGLTPNFKSNFDLAEDAKLQLSKDTYDDDLDNLLAQIGDQYADLFLAAKNLSDAILLSDILRVNTEITKAPLSASMIKRYDEHHQDLTLLKALVRQQLPEKYKEIFFDQSKNGYAGYIDGGASQEEFYKFIKPILEKMDGTEELLVKLNREDLLRKQRTFDNGSIPHQIHLGELHAILRRQEDFYPFLKDNREKIEKILTFRIPYYVGPLARGNSRFAWMTRKSEETITPWNFEEVVDKGASAQSFIERMTNFDKNLPNEKVLPKHSLLYEYFTVYNELTKVKYVTEGMRKPAFLSGEQKKAIVDLLFKTNRKVTVKQLKEDYFKKIECFDSVEISGVEDRFNASLGTYHDLLKIIKDKDFLDNEENEDILEDIVLTLTLFEDREMIEERLKTYAHLFDDKVMKQLKRRRYTGWGRLSRKLINGIRDKQSGKTILDFLKSDGFANRNFMQLIHDDSLTFKEDIQKAQVSGQGDSLHEHIANLAGSPAIKKGILQTVKVVDELVKVMGRHKPENIVIEMARENQTTQKGQKNSRERMKRIEEGIKELGSQILKEHPVENTQLQNEKLYLYYLQNGRDMYVDQELDINRLSDYDVDHIVPQSFLKDDSIDNKVLTRSDKARGKSDNVPSEEVVKKMKNYWRQLLNAKLITQRKFDNLTKAERGGLSELDKAGFIKRQLVETRQITKHVAQILDSRMNTKYDENDKLIREVKVITLKSKLVSDFRKDFQFYKVREINNYHHAHDAYLNAVVGTALIKKYPKLESEFVYGDYKVYDVRKMIAKSEQEIGKATAKYFFYSNIMNFFKTEITLANGEIRKRPLIETNGETGEIVWDKGRDFATVRKVLSMPQVNIVKKTEVQTGGFSKESILPKRNSDKLIARKKDWDPKKYGGFDSPTVAYSVLVVAKVEKGKSKKLKSVKELLGITIMERSSFEKNPIDFLEAKGYKEVKKDLIIKLPKYSLFELENGRKRMLASAGELQKGNELALPSKYVNFLYLASHYEKLKGSPEDNEQKQLFVEQHKHYLDEIIEQISEFSKRVILADANLDKVLSAYNKHRDKPIREQAENIIHLFTLTNLGAPAAFKYFDTTIDRKRYTSTKEVLDATLIHQSITGLYETRIDLSQLGGDGGEAAAKGGSGGGGGLLGRDLLTKLKAQIQFSTEGPQVTWEDRPAMCLVLNLEEEYRLHEKPVPPSIDPSWLQLFPMVWAEKAGMGLANQVPPVVVELKSDASPVAVRQYPMSKEAREGIRPHIQRFLDLGILVPCQSPWNTPLLPVKKPGTNDYRPVQDLREVNKRVQDIHPTVPNPYNLLSSLPPSHTWYSVLDLKDAFFCLKLHPNSQPLFAFEWRDPEKGNTGQLTWTRLPQGFKNSPTLFNEALHRDLASFRALNPQVVMLQYVDDLLVAAPTYRDCKEGTRRLLQELSKLGYRVSAKKAQLCREEVTYLGYLLKGGKRWLTPARKATVMKIPTPTTPRQVREFLGTAGFCRLWIPGFASLAAPLYPLTRPKVPFTWTEAHQEAFGRIKEALLSAPALALPDLTKPFALYVDEKEGVARGVLTQTLGPWRRPVAYLSKKLDPVASGWPTCLKAIAAVALLLKDADKLTLGQNVLVIAPHNLESIVRQPPDRWMTNARMTHYQSLLLNERVSFAPPAILNPATLLPVESDDTPIHICSEILAEETGTRPDLRDQPLPGVPAWYTDGSSFIMDGRRQAGAAIVDNKRTVWASNLPEGTSAQKAELIALTQALRLAEGKSINIYTDSRYAFATAHVHGAIYKQRGWLTSAGKDIKNKEEILALLEAIHLPKRVAIIHCPGHQRGTDPVATGNRKADEAAKQAAQSTRILTETTKNAGKRTADGSEFEKRTADGSEFESPKKKAKVE

SEQ ID NO: 6943 - protein, 2127 aa, synthetic construct
MPAAKRVKLDGGDKKYSIGLDIGTNSVGWAVITDEYKVPSKKFKVLGNTDRHSIKKNLIGALLFDSGETAEATRLKRTARRRYTRRKNRICYLQEIFSNEMAKVDDSFFHRLEESFLVEEDKKHERHPIFGNIVDEVAYHEKYPTIYHLRKKLVDSTDKADLRLIYLALAHMIKFRGHFLIEGDLNPDNSDVDKLFIQLVQTYNQLFEENPINASGVDAKAILSARLSKSRRLENLIAQLPGEKKNGLFGNLIALSLGLTPNFKSNFDLAEDAKLQLSKDTYDDDLDNLLAQIGDQYADLFLAAKNLSDAILLSDILRVNTEITKAPLSASMIKRYDEHHQDLTLLKALVRQQLPEKYKEIFFDQSKNGYAGYIDGGASQEEFYKFIKPILEKMDGTEELLVKLNREDLLRKQRTFDNGSIPHQIHLGELHAILRRQEDFYPFLKDNREKIEKILTFRIPYYVGPLARGNSRFAWMTRKSEETITPWNFEEVVDKGASAQSFIERMTNFDKNLPNEKVLPKHSLLYEYFTVYNELTKVKYVTEGMRKPAFLSGEQKKAIVDLLFKTNRKVTVKQLKEDYFKKIECFDSVEISGVEDRFNASLGTYHDLLKIIKDKDFLDNEENEDILEDIVLTLTLFEDREMIEERLKTYAHLFDDKVMKQLKRRRYTGWGRLSRKLINGIRDKQSGKTILDFLKSDGFANRNFMQLIHDDSLTFKEDIQKAQVSGQGDSLHEHIANLAGSPAIKKGILQTVKVVDELVKVMGRHKPENIVIEMARENQTTQKGQKNSRERMKRIEEGIKELGSQILKEHPVENTQLQNEKLYLYYLQNGRDMYVDQELDINRLSDYDVDHIVPQSFLKDDSIDNKVLTRSDKARGKSDNVPSEEVVKKMKNYWRQLLNAKLITQRKFDNLTKAERGGLSELDKAGFIKRQLVETRQITKHVAQILDSRMNTKYDENDKLIREVKVITLKSKLVSDFRKDFQFYKVREINNYHHAHDAYLNAVVGTALIKKYPKLESEFVYGDYKVYDVRKMIAKSEQEIGKATAKYFFYSNIMNFFKTEITLANGEIRKRPLIETNGETGEIVWDKGRDFATVRKVLSMPQVNIVKKTEVQTGGFSKESILPKRNSDKLIARKKDWDPKKYGGFDSPTVAYSVLVVAKVEKGKSKKLKSVKELLGITIMERSSFEKNPIDFLEAKGYKEVKKDLIIKLPKYSLFELENGRKRMLASAGELQKGNELALPSKYVNFLYLASHYEKLKGSPEDNEQKQLFVEQHKHYLDEIIEQISEFSKRVILADANLDKVLSAYNKHRDKPIREQAENIIHLFTLTNLGAPAAFKYFDTTIDRKRYTSTKEVLDATLIHQSITGLYETRIDLSQLGGDGGEAAAKGGSGGGGGLLGRDLLTKLKAQIQFSTEGPQVTWEDRPAMCLVLNLEEEYRLHEKPVPPSIDPSWLQLFPMVWAEKAGMGLANQVPPVVVELKSDASPVAVRQYPMSKEAREGIRPHIQRFLDLGILVPCQSPWNTPLLPVKKPGTNDYRPVQDLREVNKRVQDIHPTVPNPYNLLSSLPPSHTWYSVLDLKDAFFCLKLHPNSQPLFAFEWRDPEKGNTGQLTWTRLPQGFKNSPTLFNEALHRDLASFRALNPQVVMLQYVDDLLVAAPTYRDCKEGTRRLLQELSKLGYRVSAKKAQLCREEVTYLGYLLKGGKRWLTPARKATVMKIPTPTTPRQVREFLGKAGFCRLFIPGFASLAAPLYPLTRPKVPFTWTEAHQEAFGRIKEALLSAPALALPDLTKPFALYVDEKEGVARGVLTQTLGPWRRPVAYLSKKLDPVASGWPTCLKAIAAVALLLKDADKLTLGQNVLVIAPHNLESIVRQPPDRWMTNARMTHYQSLLLNERVSFAPPAILNPATLLPVESDDTPIHICSEILAEETGTRPDLRDQPLPGVPAWYTDGSSFIMDGRRQAGAAIVDNKRTVWASNLPEGTSAQKAELIALTQALRLAEGKSINIYTDSRYAFATAHVHGAIYKQRGWLTSAGKDIKNKEEILALLEAIHLPKRVAIIHCPGHQRGTDPVATGNRKADEAAKQAAQSTRILTETTKNAGKRTADGSEFEKRTADGSEFESPKKKAKVE

SEQ ID NO: 6944 - protein, 2218 aa, synthetic construct
MPAAKRVKLDGGDKKYSIGLDIGTNSVGWAVITDEYKVPSKKFKVLGNTDRHSIKKNLIGALLFDSGETAEATRLKRTARRRYTRRKNRICYLQEIFSNEMAKVDDSFFHRLEESFLVEEDKKHERHPIFGNIVDEVAYHEKYPTIYHLRKKLVDSTDKADLRLIYLALAHMIKFRGHFLIEGDLNPDNSDVDKLFIQLVQTYNQLFEENPINASGVDAKAILSARLSKSRRLENLIAQLPGEKKNGLFGNLIALSLGLTPNFKSNFDLAEDAKLQLSKDTYDDDLDNLLAQIGDQYADLFLAAKNLSDAILLSDILRVNTEITKAPLSASMIKRYDEHHQDLTLLKALVRQQLPEKYKEIFFDQSKNGYAGYIDGGASQEEFYKFIKPILEKMDGTEELLVKLNREDLLRKQRTFDNGSIPHQIHLGELHAILRRQEDFYPFLKDNREKIEKILTFRIPYYVGPLARGNSRFAWMTRKSEETITPWNFEEVVDKGASAQSFIERMTNFDKNLPNEKVLPKHSLLYEYFTVYNELTKVKYVTEGMRKPAFLSGEQKKAIVDLLFKTNRKVTVKQLKEDYFKKIECFDSVEISGVEDRFNASLGTYHDLLKIIKDKDFLDNEENEDILEDIVLTLTLFEDREMIEERLKTYAHLFDDKVMKQLKRRRYTGWGRLSRKLINGIRDKQSGKTILDFLKSDGFANRNFMQLIHDDSLTFKEDIQKAQVSGQGDSLHEHIANLAGSPAIKKGILQTVKVVDELVKVMGRHKPENIVIEMARENQTTQKGQKNSRERMKRIEEGIKELGSQILKEHPVENTQLQNEKLYLYYLQNGRDMYVDQELDINRLSDYDVDHIVPQSFLKDDSIDNKVLTRSDKARGKSDNVPSEEVVKKMKNYWRQLLNAKLITQRKFDNLTKAERGGLSELDKAGFIKRQLVETRQITKHVAQILDSRMNTKYDENDKLIREVKVITLKSKLVSDFRKDFQFYKVREINNYHHAHDAYLNAVVGTALIKKYPKLESEFVYGDYKVYDVRKMIAKSEQEIGKATAKYFFYSNIMNFFKTEITLANGEIRKRPLIETNGETGEIVWDKGRDFATVRKVLSMPQVNIVKKTEVQTGGFSKESILPKRNSDKLIARKKDWDPKKYGGFDSPTVAYSVLVVAKVEKGKSKKLKSVKELLGITIMERSSFEKNPIDFLEAKGYKEVKKDLIIKLPKYSLFELENGRKRMLASAGELQKGNELALPSKYVNFLYLASHYEKLKGSPEDNEQKQLFVEQHKHYLDEIIEQISEFSKRVILADANLDKVLSAYNKHRDKPIREQAENIIHLFTLTNLGAPAAFKYFDTTIDRKRYTSTKEVLDATLIHQSITGLYETRIDLSQLGGDGGEAAAKGGSGGGGGTLGDQGSRGSDPLPEPRVTLTVEGIPTEFLVNTGAEHSVLTKPMGKMGSKRTVVAGATGSKVYPWTTKRLLKIGQKQVTHSFLVIPECPAPLLGRDLLTKLKAQIQFSTEGPQVTWEDRPAMCLVLNLEEEYRLHEKPVPPSIDPSWLQLFPMVWAEKAGMGLANQVPPVVVELKSDASPVAVRQYPMSKEAREGIRPHIQRFLDLGILVPCQSPWNTPLLPVKKPGTNDYRPVQDLREVNKRVQDIHPTVPNPYNLLSSLPPSHTWYSVLDLKDAFFCLKLHPNSQPLFAFEWRDPEKGNTGQLTWTRLPQGFKNSPTLFNEALHRDLASFRALNPQVVMLQYVDDLLVAAPTYRDCKEGTRRLLQELSKLGYRVSAKKAQLCREEVTYLGYLLKGGKRWLTPARKATVMKIPTPTTPRQVREFLGTAGFCRLWIPGFASLAAPLYPLTRPKVPFTWTEAHQEAFGRIKEALLSAPALALPDLTKPFALYVDEKEGVARGVLTQTLGPWRRPVAYLSKKLDPVASGWPTCLKAIAAVALLLKDADKLTLGQNVLVIAPHNLESIVRQPPDRWMTNARMTHYQSLLLNERVSFAPPAILNPATLLPVESDDTPIHICSEILAEETGTRPDLRDQPLPGVPAWYTDGSSFIMDGRRQAGAAIVDNKRTVWASNLPEGTSAQKAELIALTQALRLAEGKSINIYTDSRYAFATAHVHGAIYKQRGWLTSAGKDIKNKEEILALLEAIHLPKRVAIIHCPGHQRGTDPVATGNRKADEAAKQAAQSTRILTETTKNAGKRTADGSEFEKRTADGSEFESPKKKAKVE

SEQ ID NO: 6945 - protein, 2218 aa, synthetic construct
MPAAKRVKLDGGDKKYSIGLDIGTNSVGWAVITDEYKVPSKKFKVLGNTDRHSIKKNLIGALLFDSGETAEATRLKRTARRRYTRRKNRICYLQEIFSNEMAKVDDSFFHRLEESFLVEEDKKHERHPIFGNIVDEVAYHEKYPTIYHLRKKLVDSTDKADLRLIYLALAHMIKFRGHFLIEGDLNPDNSDVDKLFIQLVQTYNQLFEENPINASGVDAKAILSARLSKSRRLENLIAQLPGEKKNGLFGNLIALSLGLTPNFKSNFDLAEDAKLQLSKDTYDDDLDNLLAQIGDQYADLFLAAKNLSDAILLSDILRVNTEITKAPLSASMIKRYDEHHQDLTLLKALVRQQLPEKYKEIFFDQSKNGYAGYIDGGASQEEFYKFIKPILEKMDGTEELLVKLNREDLLRKQRTFDNGSIPHQIHLGELHAILRRQEDFYPFLKDNREKIEKILTFRIPYYVGPLARGNSRFAWMTRKSEETITPWNFEEVVDKGASAQSFIERMTNFDKNLPNEKVLPKHSLLYEYFTVYNELTKVKYVTEGMRKPAFLSGEQKKAIVDLLFKTNRKVTVKQLKEDYFKKIECFDSVEISGVEDRFNASLGTYHDLLKIIKDKDFLDNEENEDILEDIVLTLTLFEDREMIEERLKTYAHLFDDKVMKQLKRRRYTGWGRLSRKLINGIRDKQSGKTILDFLKSDGFANRNFMQLIHDDSLTFKEDIQKAQVSGQGDSLHEHIANLAGSPAIKKGILQTVKVVDELVKVMGRHKPENIVIEMARENQTTQKGQKNSRERMKRIEEGIKELGSQILKEHPVENTQLQNEKLYLYYLQNGRDMYVDQELDINRLSDYDVDHIVPQSFLKDDSIDNKVLTRSDKARGKSDNVPSEEVVKKMKNYWRQLLNAKLITQRKFDNLTKAERGGLSELDKAGFIKRQLVETRQITKHVAQILDSRMNTKYDENDKLIREVKVITLKSKLVSDFRKDFQFYKVREINNYHHAHDAYLNAVVGTALIKKYPKLESEFVYGDYKVYDVRKMIAKSEQEIGKATAKYFFYSNIMNFFKTEITLANGEIRKRPLIETNGETGEIVWDKGRDFATVRKVLSMPQVNIVKKTEVQTGGFSKESILPKRNSDKLIARKKDWDPKKYGGFDSPTVAYSVLVVAKVEKGKSKKLKSVKELLGITIMERSSFEKNPIDFLEAKGYKEVKKDLIIKLPKYSLFELENGRKRMLASAGELQKGNELALPSKYVNFLYLASHYEKLKGSPEDNEQKQLFVEQHKHYLDEIIEQISEFSKRVILADANLDKVLSAYNKHRDKPIREQAENIIHLFTLTNLGAPAAFKYFDTTIDRKRYTSTKEVLDATLIHQSITGLYETRIDLSQLGGDGGEAAAKGGSGGGGGTLGDQGSRGSDPLPEPRVTLTVEGIPTEFLVNTGAEHSVLTKPMGKMGSKRTVVAGATGSKVYPWTTKRLLKIGQKQVTHSFLVIPECPAPLLGRDLLTKLKAQIQFSTEGPQVTWEDRPAMCLVLNLEEEYRLHEKPVPPSIDPSWLQLFPMVWAEKAGMGLANQVPPVVVELKSDASPVAVRQYPMSKEAREGIRPHIQRFLDLGILVPCQSPWNTPLLPVKKPGTNDYRPVQDLREVNKRVQDIHPTVPNPYNLLSSLPPSHTWYSVLDLKDAFFCLKLHPNSQPLFAFEWRDPEKGNTGQLTWTRLPQGFKNSPTLFNEALHRDLASFRALNPQVVMLQYVDDLLVAAPTYRDCKEGTRRLLQELSKLGYRVSAKKAQLCREEVTYLGYLLKGGKRWLTPARKATVMKIPTPTTPRQVREFLGKAGFCRLFIPGFASLAAPLYPLTRPKVPFTWTEAHQEAFGRIKEALLSAPALALPDLTKPFALYVDEKEGVARGVLTQTLGPWRRPVAYLSKKLDPVASGWPTCLKAIAAVALLLKDADKLTLGQNVLVIAPHNLESIVRQPPDRWMTNARMTHYQSLLLNERVSFAPPAILNPATLLPVESDDTPIHICSEILAEETGTRPDLRDQPLPGVPAWYTDGSSFIMDGRRQAGAAIVDNKRTVWASNLPEGTSAQKAELIALTQALRLAEGKSINIYTDSRYAFATAHVHGAIYKQRGWLTSAGKDIKNKEEILALLEAIHLPKRVAIIHCPGHQRGTDPVATGNRKADEAAKQAAQSTRILTETTKNAGKRTADGSEFEKRTADGSEFESPKKKAKVE

SEQ ID NO: 6946 - protein, 2096 aa, synthetic construct
MPAAKRVKLDGGDKKYSIGLDIGTNSVGWAVITDEYKVPSKKFKVLGNTDRHSIKKNLIGALLFDSGETAEATRLKRTARRRYTRRKNRICYLQEIFSNEMAKVDDSFFHRLEESFLVEEDKKHERHPIFGNIVDEVAYHEKYPTIYHLRKKLVDSTDKADLRLIYLALAHMIKFRGHFLIEGDLNPDNSDVDKLFIQLVQTYNQLFEENPINASGVDAKAILSARLSKSRRLENLIAQLPGEKKNGLFGNLIALSLGLTPNFKSNFDLAEDAKLQLSKDTYDDDLDNLLAQIGDQYADLFLAAKNLSDAILLSDILRVNTEITKAPLSASMIKRYDEHHQDLTLLKALVRQQLPEKYKEIFFDQSKNGYAGYIDGGASQEEFYKFIKPILEKMDGTEELLVKLNREDLLRKQRTFDNGSIPHQIHLGELHAILRRQEDFYPFLKDNREKIEKILTFRIPYYVGPLARGNSRFAWMTRKSEETITPWNFEEVVDKGASAQSFIERMTNFDKNLPNEKVLPKHSLLYEYFTVYNELTKVKYVTEGMRKPAFLSGEQKKAIVDLLFKTNRKVTVKQLKEDYFKKIECFDSVEISGVEDRFNASLGTYHDLLKIIKDKDFLDNEENEDILEDIVLTLTLFEDREMIEERLKTYAHLFDDKVMKQLKRRRYTGWGRLSRKLINGIRDKQSGKTILDFLKSDGFANRNFMQLIHDDSLTFKEDIQKAQVSGQGDSLHEHIANLAGSPAIKKGILQTVKVVDELVKVMGRHKPENIVIEMARENQTTQKGQKNSRERMKRIEEGIKELGSQILKEHPVENTQLQNEKLYLYYLQNGRDMYVDQELDINRLSDYDVDHIVPQSFLKDDSIDNKVLTRSDKARGKSDNVPSEEVVKKMKNYWRQLLNAKLITQRKFDNLTKAERGGLSELDKAGFIKRQLVETRQITKHVAQILDSRMNTKYDENDKLIREVKVITLKSKLVSDFRKDFQFYKVREINNYHHAHDAYLNAVVGTALIKKYPKLESEFVYGDYKVYDVRKMIAKSEQEIGKATAKYFFYSNIMNFFKTEITLANGEIRKRPLIETNGETGEIVWDKGRDFATVRKVLSMPQVNIVKKTEVQTGGFSKESILPKRNSDKLIARKKDWDPKKYGGFDSPTVAYSVLVVAKVEKGKSKKLKSVKELLGITIMERSSFEKNPIDFLEAKGYKEVKKDLIIKLPKYSLFELENGRKRMLASAGELQKGNELALPSKYVNFLYLASHYEKLKGSPEDNEQKQLFVEQHKHYLDEIIEQISEFSKRVILADANLDKVLSAYNKHRDKPIREQAENIIHLFTLTNLGAPAAFKYFDTTIDRKRYTSTKEVLDATLIHQSITGLYETRIDLSQLGGDGGEAAAKGGSGGGGGTLNLEDEYRLYETSAEPEVSPGSTWLSDFPQAWAETGGMGLAVRQAPLIIPLKATSTPVSIKQYPMSQEAKLGIKPHIQRLLDQGILVPCQSPWNTPLLPVKKPGTNDYRPVQDLREVNKRVEDIHPTVPNPYNLLSGLPPSHRWYTVLDLKDAFFCLRLHPTSQPLFAFEWRDPGMGISGQLTWTRLPQGFKNSPTLFNEALHRDLADFRIQHPDLILLQYVDDILLAATSELDCQQGTRALLLTLGNLGYRASAKKAQLCQKQVKYLGYLLKEGQRWLTEARKETVMGQPTPKTPRQLREFLGTAGFCRLWIPGFAEMAAPLYPLTKPGTLFNWGPDQQKAYQEIKQALLTAPALGLPDLTKPFELFVDEKQGYAKGVLTQKLGPWRRPVAYLSKKLDPVAAGWPPCLRMVAAIAVLRKDAGKLTMGQPLVILAPHAVEALVKQPPDRWLSNARMTHYQAMLLDTDRVQFGPVVALNPATLLPLPEEGAPHDCLEILAETHGTRPDLTDQPIPDADHTWYTDGSSFLQEGQRKAGAAVTTETEVIWARALPAGTSAQRAELIALTQALKMAEGKRLNVYTDSRYAFATAHIHGEIYRRRGWLTSEGREIKNKSEILALLKALFLPKRLSIIHCLGHQKGDSAEARGNRLADQAAREAAIKTPPDTSTLLAGKRTADGSEFEKRTADGSEFESPKKKAKVE

SEQ ID NO: 6947 - protein, 2096 aa, synthetic construct
MPAAKRVKLDGGDKKYSIGLDIGTNSVGWAVITDEYKVPSKKFKVLGNTDRHSIKKNLIGALLFDSGETAEATRLKRTARRRYTRRKNRICYLQEIFSNEMAKVDDSFFHRLEESFLVEEDKKHERHPIFGNIVDEVAYHEKYPTIYHLRKKLVDSTDKADLRLIYLALAHMIKFRGHFLIEGDLNPDNSDVDKLFIQLVQTYNQLFEENPINASGVDAKAILSARLSKSRRLENLIAQLPGEKKNGLFGNLIALSLGLTPNFKSNFDLAEDAKLQLSKDTYDDDLDNLLAQIGDQYADLFLAAKNLSDAILLSDILRVNTEITKAPLSASMIKRYDEHHQDLTLLKALVRQQLPEKYKEIFFDQSKNGYAGYIDGGASQEEFYKFIKPILEKMDGTEELLVKLNREDLLRKQRTFDNGSIPHQIHLGELHAILRRQEDFYPFLKDNREKIEKILTFRIPYYVGPLARGNSRFAWMTRKSEETITPWNFEEVVDKGASAQSFIERMTNFDKNLPNEKVLPKHSLLYEYFTVYNELTKVKYVTEGMRKPAFLSGEQKKAIVDLLFKTNRKVTVKQLKEDYFKKIECFDSVEISGVEDRFNASLGTYHDLLKIIKDKDFLDNEENEDILEDIVLTLTLFEDREMIEERLKTYAHLFDDKVMKQLKRRRYTGWGRLSRKLINGIRDKQSGKTILDFLKSDGFANRNFMQLIHDDSLTFKEDIQKAQVSGQGDSLHEHIANLAGSPAIKKGILQTVKVVDELVKVMGRHKPENIVIEMARENQTTQKGQKNSRERMKRIEEGIKELGSQILKEHPVENTQLQNEKLYLYYLQNGRDMYVDQELDINRLSDYDVDHIVPQSFLKDDSIDNKVLTRSDKARGKSDNVPSEEVVKKMKNYWRQLLNAKLITQRKFDNLTKAERGGLSELDKAGFIKRQLVETRQITKHVAQILDSRMNTKYDENDKLIREVKVITLKSKLVSDFRKDFQFYKVREINNYHHAHDAYLNAVVGTALIKKYPKLESEFVYGDYKVYDVRKMIAKSEQEIGKATAKYFFYSNIMNFFKTEITLANGEIRKRPLIETNGETGEIVWDKGRDFATVRKVLSMPQVNIVKKTEVQTGGFSKESILPKRNSDKLIARKKDWDPKKYGGFDSPTVAYSVLVVAKVEKGKSKKLKSVKELLGITIMERSSFEKNPIDFLEAKGYKEVKKDLIIKLPKYSLFELENGRKRMLASAGELQKGNELALPSKYVNFLYLASHYEKLKGSPEDNEQKQLFVEQHKHYLDEIIEQISEFSKRVILADANLDKVLSAYNKHRDKPIREQAENIIHLFTLTNLGAPAAFKYFDTTIDRKRYTSTKEVLDATLIHQSITGLYETRIDLSQLGGDGGEAAAKGGSGGGGGLGIEDEYRLHETSTEPDVSLGSTWLSDFPQAWAETGGMGLAVRQAPLIIPLKATSTPVSIQQYPMSHEARLGIKPHIQRLLDQGILVPCQSPWNTPLLPVKKPGTNDYRPVQDLREVNKRVEDIHPTVPNPYNLLSGLPPSHQWYTVLDLKDAFFCLRLHPTSQPLFAFEWRDPGMGISGQLTWTRLPQGFKNSPTLFNEALHRDLADFRIQHPDLILLQYVDDILLAATSELDCQQGTRALLQTLGDLGYRASAKKAQICQKQVKYLGYLLREGQRWLTEARKETVMGQPVPKTPRQLREFLGKAGFCRLFIPGFAEMAAPLYPLTKPGTLFSWGPDQQKAYQEIKQALLTAPALGLPDLTKPFELFVDEKQGYAKGVLTQKLGPWRRPVAYLSKKLDPVAAGWPPCLRMVAAIAVLTKDAGKLTMGQPLVILAPHAVEALVKQPPDRWLSNARMTHYQAMLLDTDRVQFGPVVALNPATLLPLPEEGAPHDCLEILAETHGTRPDLTDQPIPDADHTWYTDGSSFLQEGQRKAGAAVTTETEVIWAGALPAGTSAQRAELIALTQALKMAEGKRLNVYTDSRYAFATAHIHGEIYRRRGWLTSEGREIKNKSEILALLKALFLPKRLSIIHCLGHQKGDSAEARGNRLADQAAREAAIKTPPDTSTLLIAGKRTADGSEFEKRTADGSEFESPKKKAKVE

SEQ ID NO: 6948 - protein, 2096 aa, synthetic construct; identical to SEQ ID NO: 6947

SEQ ID NO: 6949 - protein, 2096 aa, synthetic construct
MPAAKRVKLDGGDKKYSIGLDIGTNSVGWAVITDEYKVPSKKFKVLGNTDRHSIKKNLIGALLFDSGETAEATRLKRTARRRYTRRKNRICYLQEIFSNEMAKVDDSFFHRLEESFLVEEDKKHERHPIFGNIVDEVAYHEKYPTIYHLRKKLVDSTDKADLRLIYLALAHMIKFRGHFLIEGDLNPDNSDVDKLFIQLVQTYNQLFEENPINASGVDAKAILSARLSKSRRLENLIAQLPGEKKNGLFGNLIALSLGLTPNFKSNFDLAEDAKLQLSKDTYDDDLDNLLAQIGDQYADLFLAAKNLSDAILLSDILRVNTEITKAPLSASMIKRYDEHHQDLTLLKALVRQQLPEKYKEIFFDQSKNGYAGYIDGGASQEEFYKFIKPILEKMDGTEELLVKLNREDLLRKQRTFDNGSIPHQIHLGELHAILRRQEDFYPFLKDNREKIEKILTFRIPYYVGPLARGNSRFAWMTRKSEETITPWNFEEVVDKGASAQSFIERMTNFDKNLPNEKVLPKHSLLYEYFTVYNELTKVKYVTEGMRKPAFLSGEQKKAIVDLLFKTNRKVTVKQLKEDYFKKIECFDSVEISGVEDRFNASLGTYHDLLKIIKDKDFLDNEENEDILEDIVLTLTLFEDREMIEERLKTYAHLFDDKVMKQLKRRRYTGWGRLSRKLINGIRDKQSGKTILDFLKSDGFANRNFMQLIHDDSLTFKEDIQKAQVSGQGDSLHEHIANLAGSPAIKKGILQTVKVVDELVKVMGRHKPENIVIEMARENQTTQKGQKNSRERMKRIEEGIKELGSQILKEHPVENTQLQNEKLYLYYLQNGRDMYVDQELDINRLSDYDVDHIVPQSFLKDDSIDNKVLTRSDKARGKSDNVPSEEVVKKMKNYWRQLLNAKLITQRKFDNLTKAERGGLSELDKAGFIKRQLVETRQITKHVAQILDSRMNTKYDENDKLIREVKVITLKSKLVSDFRKDFQFYKVREINNYHHAHDAYLNAVVGTALIKKYPKLESEFVYGDYKVYDVRKMIAKSEQEIGKATAKYFFYSNIMNFFKTEITLANGEIRKRPLIETNGETGEIVWDKGRDFATVRKVLSMPQVNIVKKTEVQTGGFSKESILPKRNSDKLIARKKDWDPKKYGGFDSPTVAYSVLVVAKVEKGKSKKLKSVKELLGITIMERSSFEKNPIDFLEAKGYKEVKKDLIIKLPKYSLFELENGRKRMLASAGELQKGNELALPSKYVNFLYLASHYEKLKGSPEDNEQKQLFVEQHKHYLDEIIEQISEFSKRVILADANLDKVLSAYNKHRDKPIREQAENIIHLFTLTNLGAPAAFKYFDTTIDRKRYTSTKEVLDATLIHQSITGLYETRIDLSQLGGDGGEAAAKGGSGGGGGTLNIEDEYRLHETSKEPDVSLGSTWLSDFPQAWAETGGMGLAVRQAPLIIPLKATSTPVSIKQYPMSQEARLGIKPHIQRLLDQGILVPCQSPWNTPLLPVKKPGTNDYRPVQDLREVNKRVEDIHPTVPNPYNLLSGLPPSHQWYTVLDLKDAFFCLRLHPTSQPLFAFEWRDPEMGISGQLTWTRLPQGFKNSPTLFNEALHRDLAGFRIQHPDLILLQYVDDLLLAATSELDCQQGTRALLQTLGDLGYRASAKKAQICQKQVKYLGYLLKEGQRWLTEARKETVMGQPIPKTPRQLREFLGTAGFCRLWIPGFAEMAAPLYPLTKPGTLFNWGPDQQKAFQEIKQALLTAPALGLPDLTKPFELFVDEKQGYAKGVLTQKLGPWRRPVAYLSKKLDPVAAGWPPCLRMVAAIAVLTKDAGKLTMGQPLVILAPHAVEALVKQPPDRWLSNARMTHYQALLLDTDRVQFGPVVALNPATLLPLPEEGLQHDCLDILAEAHGTRSDLMDQPLPDADHTWYTDGSSFLQEGQRKAGAAVTTETEVIWARALPAGTSAQRAELIALTQALKMAEGKKLNVYTDSRYAFATAHIHGEIYRRRGWLTSEGKEIKNKDEILALLKALFLPKRLSIIHCPGHQKGNSAEARGNRMADQAAREVATRETPETSTLLAGKRTADGSEFEKRTADGSEFESPKKKAKVE

SEQ ID NO: 6950 - protein, 2090 aa, synthetic construct
MPAAKRVKLDGGDKKYSIGLDIGTNSVGWAVITDEYKVPSKKFKVLGNTDRHSIKKNLIGALLFDSGETAEATRLKRTARRRYTRRKNRICYLQEIFSNEMAKVDDSFFHRLEESFLVEEDKKHERHPIFGNIVDEVAYHEKYPTIYHLRKKLVDSTDKADLRLIYLALAHMIKFRGHFLIEGDLNPDNSDVDKLFIQLVQTYNQLFEENPINASGVDAKAILSARLSKSRRLENLIAQLPGEKKNGLFGNLIALSLGLTPNFKSNFDLAEDAKLQLSKDTYDDDLDNLLAQIGDQYADLFLAAKNLSDAILLSDILRVNTEITKAPLSASMIKRYDEHHQDLTLLKALVRQQLPEKYKEIFFDQSKNGYAGYIDGGASQEEFYKFIKPILEKMDGTEELLVKLNREDLLRKQRTFDNGSIPHQIHLGELHAILRRQEDFYPFLKDNREKIEKILTFRIPYYVGPLARGNSRFAWMTRKSEETITPWNFEEVVDKGASAQSFIERMTNFDKNLPNEKVLPKHSLLYEYFTVYNELTKVKYVTEGMRKPAFLSGEQKKAIVDLLFKTNRKVTVKQLKEDYFKKIECFDSVEISGVEDRFNASLGTYHDLLKIIKDKDFLDNEENEDILEDIVLTLTLFEDREMIEERLKTYAHLFDDKVMKQLKRRRYTGWGRLSRKLINGIRDKQSGKTILDFLKSDGFANRNFMQLIHDDSLTFKEDIQKAQVSGQGDSLHEHIANLAGSPAIKKGILQTVKVVDELVKVMGRHKPENIVIEMARENQTTQKGQKNSRERMKRIEEGIKELGSQILKEHPVENTQLQNEKLYLYYLQNGRDMYVDQELDINRLSDYDVDHIVPQSFLKDDSIDNKVLTRSDKARGKSDNVPSEEVVKKMKNYWRQLLNAKLITQRKFDNLTKAERGGLSELDKAGFIKRQLVETRQITKHVAQILDSRMNTKYDENDKLIREVKVITLKSKLVSDFRKDFQFYKVREINNYHHAHDAYLNAVVGTALIKKYPKLESEFVYGDYKVYDVRKMIAKSEQEIGKATAKYFFYSNIMNFFKTEITLANGEIRKRPLIETNGETGEIVWDKGRDFATVRKVLSMPQVNIVKKTEVQTGGFSKESILPKRNSDKLIARKKDWDPKKYGGFDSPTVAYSVLVVAKVEKGKSKKLKSVKELLGITIMERSSFEKNPIDFLEAKGYKEVKKDLIIKLPKYSLFELENGRKRMLASAGELQKGNELALPSKYVNFLYLASHYEKLKGSPEDNEQKQLFVEQHKHYLDEIIEQISEFSKRVILADANLDKVLSAYNKHRDKPIREQAENIIHLFTLTNLGAPAAFKYFDTTIDRKRYTSTKEVLDATLIHQSITGLYETRIDLSQLGGDGGEAAAKGGSGGGGGTLQLDDEYRLYSPLVKPDQNIQFWLEQFPQAWAETAGMGLAKQVPPQVIQLKASATPVSVRQYPLSKEAQEGIRPHVQRLIQQGILVPVQSPWNTPLLPVRKPGTNDYRPVQDLREVNKRVQDIHPTVPNPYNLLCALPPQRSWYTVLDLKDAFFCLRLHPTSQPLFAFEWRDPGTGRTGQLTWTRLPQGFKNSPTIFDEALHRDLANFRIQHPQVTLLQYVDDLLLAGATKQDCLEGTKALLLELSDLGYRASAKKAQICRREVTYLGYSLRDGQRWLTEARKKTVVQIPAPTTAKQVREFLGTAGFCRLWIPGFATLAAPLYPLTKEKGEFSWAPEHQKAFDAIKKALLSAPALALPDVTKPFTLYVDERKGVARGVLTQTLGPWRRPVAYLSKKLDPVASGWPVCLKAIAAVAILVKDADKLTLGQNITVIAPHALENIVRQPPDRWMTNARMTHYQSLLLTERVTFAPPAALNPATLLPEETDEPVTHDCHQLLIEETGVRKDLTDIPLTGEVLTWFTDGSSYVVEGKRMAGAAVVDGTRTIWASSLPEGTSAQKAELMALTQALRLAEGKSINIYTDSRYAFATAHVHGAIYKQRGLLTSAGREIKNKEEILSLLEALHLPKRLAIIHCPGHQKAKDPISRGNQMADRVAKQAAQGVNLLAGKRTADGSEFEKRTADGSEFESPKKKAKVE

SEQ ID NO: 6951 - protein, 2087 aa, synthetic construct
MPAAKRVKLDGGDKKYSIGLDIGTNSVGWAVITDEYKVPSKKFKVLGNTDRHSIKKNLIGALLFDSGETAEATRLKRTARRRYTRRKNRICYLQEIFSNEMAKVDDSFFHRLEESFLVEEDKKHERHPIFGNIVDEVAYHEKYPTIYHLRKKLVDSTDKADLRLIYLALAHMIKFRGHFLIEGDLNPDNSDVDKLFIQLVQTYNQLFEENPINASGVDAKAILSARLSKSRRLENLIAQLPGEKKNGLFGNLIALSLGLTPNFKSNFDLAEDAKLQLSKDTYDDDLDNLLAQIGDQYADLFLAAKNLSDAILLSDILRVNTEITKAPLSASMIKRYDEHHQDLTLLKALVRQQLPEKYKEIFFDQSKNGYAGYIDGGASQEEFYKFIKPILEKMDGTEELLVKLNREDLLRKQRTFDNGSIPHQIHLGELHAILRRQEDFYPFLKDNREKIEKILTFRIPYYVGPLARGNSRFAWMTRKSEETITPWNFEEVVDKGASAQSFIERMTNFDKNLPNEKVLPKHSLLYEYFTVYNELTKVKYVTEGMRKPAFLSGEQKKAIVDLLFKTNRKVTVKQLKEDYFKKIECFDSVEISGVEDRFNASLGTYHDLLKIIKDKDFLDNEENEDILEDIVLTLTLFEDREMIEERLKTYAHLFDDKVMKQLKRRRYTGWGRLSRKLINGIRDKQSGKTILDFLKSDGFANRNFMQLIHDDSLTFKEDIQKAQVSGQGDSLHEHIANLAGSPAIKKGILQTVKVVDELVKVMGRHKPENIVIEMARENQTTQKGQKNSRERMKRIEEGIKELGSQILKEHPVENTQLQNEKLYLYYLQNGRDMYVDQELDINRLSDYDVDHIVPQSFLKDDSIDNKVLTRSDKARGKSDNVPSEEVVKKMKNYWRQLLNAKLITQRKFDNLTKAERGGLSELDKAGFIKRQLVETRQITKHVAQILDSRMNTKYDENDKLIREVKVITLKSKLVSDFRKDFQFYKVREINNYHHAHDAYLNAVVGTALIKKYPKLESEFVYGDYKVYDVRKMIAKSEQEIGKATAKYFFYSNIMNFFKTEITLANGEIRKRPLIETNGETGEIVWDKGRDFATVRKVLSMPQVNIVKKTEVQTGGFSKESILPKRNSDKLIARKKDWDPKKYGGFDSPTVAYSVLVVAKVEKGKSKKLKSVKELLGITIMERSSFEKNPIDFLEAKGYKEVKKDLIIKLPKYSLFELENGRKRMLASAGELQKGNELALPSKYVNFLYLASHYEKLKGSPEDNEQKQLFVEQHKHYLDEIIEQISEFSKRVILADANLDKVLSAYNKHRDKPIREQAENIIHLFTLTNLGAPAAFKYFDTTIDRKRYTSTKEVLDATLIHQSITGLYETRIDLSQLGGDGGEAAAKGGSGGGGGIPWLMKKPLQLTTLVPLQEYEERLLKQTMLTGSYKEKLQSLFLKYDALWQHWENQVGHRRIKPHHIATGTVNPRPQKQYPINPKAKASIQTVINDLLKQGVLIQQNSIMNTPVYPVPKPDGKWRMVLDYREVNKTIPLIAAQNQHSAGILSSIFRGKYKTTLDLSNGFWAHSITPESYWLTAFTWLGQQYCWTRLPQGFLNSPALFTADVVDLLKEVPNVQVYVDDIYISHDDPREHLEQLEKVFSLLLNAGYVVSLKKSEIAQHEVEFLGFNITKEGRGLTETFKQKLLNITPPRDLKQLQSILGLLNFARNFIPNFSELVKPLYNIIATANGKYITWTTDNSQQLQNIISMLNSAENLEERNPEVRLIMKVNTSPSAGYIRFYNEFAKRPIMYLNYVYTKAEVKFTNTEKLLTTIHKGLIKALDLGMGQEILVYSPIVSMTKIQKTPLPERKALPIRWITWMSYLEDPRIQFHYDKTLPELQQVPTVTDDIIAKIKHPSEFSMVFYTDGSAIKHPNVNKSHNAGMGIAQVQFKPEFTVINTWSIPLGDHTAQLAEVAAVEFACKKALKIDGPVLIVTDSFYVAESVNKELPYWQSNGFFNNKKKPLKHVSKWKSIADCIQLKPDIIIIHEKGHQPTASTFHTEGNNLADKLATQGSYVVNAGKRTADGSEFEKRTADGSEFESPKKKAKVE

SEQ ID NO: 6952 - protein, 2176 aa, synthetic construct
MPAAKRVKLDGGDKKYSIGLDIGTNSVGWAVITDEYKVPSKKFKVLGNTDRHSIKKNLIGALLFDSGETAEATRLKRTARRRYTRRKNRICYLQEIFSNEMAKVDDSFFHRLEESFLVEEDKKHERHPIFGNIVDEVAYHEKYPTIYHLRKKLVDSTDKADLRLIYLALAHMIKFRGHFLIEGDLNPDNSDVDKLFIQLVQTYNQLFEENPINASGVDAKAILSARLSKSRRLENLIAQLPGEKKNGLFGNLIALSLGLTPNFKSNFDLAEDAKLQLSKDTYDDDLDNLLAQIGDQYADLFLAAKNLSDAILLSDILRVNTEITKAPLSASMIKRYDEHHQDLTLLKALVRQQLPEKYKEIFFDQSKNGYAGYIDGGASQEEFYKFIKPILEKMDGTEELLVKLNREDLLRKQRTFDNGSIPHQIHLGELHAILRRQEDFYPFLKDNREKIEKILTFRIPYYVGPLARGNSRFAWMTRKSEETITPWNFEEVVDKGASAQSFIERMTNFDKNLPNEKVLPKHSLLYEYFTVYNELTKVKYVTEGMRKPAFLSGEQKKAIVDLLFKTNRKVTVKQLKEDYFKKIECFDSVEISGVEDRFNASLGTYHDLLKIIKDKDFLDNEENEDILEDIVLTLTLFEDREMIEERLKTYAHLFDDKVMKQLKRRRYTGWGRLSRKLINGIRDKQSGKTILDFLKSDGFANRNFMQLIHDDSLTFKEDIQKAQVSGQGDSLHEHIANLAGSPAIKKGILQTVKVVDELVKVMGRHKPENIVIEMARENQTTQKGQKNSRERMKRIEEGIKELGSQILKEHPVENTQLQNEKLYLYYLQNGRDMYVDQELDINRLSDYDVDHIVPQSFLKDDSIDNKVLTRSDKARGKSDNVPSEEVVKKMKNYWRQLLNAKLITQRKFDNLTKAERGGLSELDKAGFIKRQLVETRQITKHVAQILDSRMNTKYDENDKLIREVKVITLKSKLVSDFRKDFQFYKVREINNYHHAHDAYLNAVVGTALIKKYPKLESEFVYGDYKVYDVRKMIAKSEQEIGKATAKYFFYSNIMNFFKTEITLANGEIRKRPLIETNGETGEIVWDKGRDFATVRKVLSMPQVNIVKKTEVQTGGFSKESILPKRNSDKLIARKKDWDPKKYGGFDSPTVAYSVLVVAKVEKGKSKKLKSVKELLGITIMERSSFEKNPIDFLEAKGYKEVKKDLIIKLPKYSLFELENGRKRMLASAGELQKGNELALPSKYVNFLYLASHYEKLKGSPEDNEQKQLFVEQHKHYLDEIIEQISEFSKRVILADANLDKVLSAYNKHRDKPIREQAENIIHLFTLTNLGAPAAFKYFDTTIDRKRYTSTKEVLDATLIHQSITGLYETRIDLSQLGGDGGEAAAKGGSGGGGGMDPLQLLQPLEAEIKGTKLKAHWNSGATITCVPQAFLEEEVPIKNIWIKTIHGEKEQPVYYLTFKIQGRKVEAEVISSPYDYILVSPSDIPWLMKKPLQLTTLVPLQEYEERLLKQTMLTGSYKEKLQSLFLKYDALWQHWENQVGHRRIKPHHIATGTVNPRPQKQYPINPKAKASIQTVINDLLKQGVLIQQNSIMNTPVYPVPKPDGKWRMVLDYREVNKTIPLIAAQNQHSAGILSSIFRGKYKTTLDLSNGFWAHSITPESYWLTAFTWLGQQYCWTRLPQGFLNSPALFNADVVDLLKEVPNVQVYVDDIYISHDDPREHLEQLEKVFSLLLNAGYVVSLKKSEIAQHEVEFLGFNITKEGRGLTETFKQKLLNITPPRDLKQLQSILGKLNFARNFIPNFSELVKPLYNIIATAPGKYITWTTDNSQQLQNIISMLNSAENLEERNPEVRLIMKVNTSPSAGYIRFYNEFAKRPIMYLNYVYTKAEVKFTNTEKLLTTIHKGLIKALDLGMGQEILVYSPIVSMTKIQKTPLPERKALPIRWITWMSYLEDPRIQFHYDKTLPELQQVPTVTDDIIAKIKHPSEFSMVFYTDGSAIKHPNVNKSHNAGMGIAQVQFKPEFTVINTWSIPLGDHTAQLAEVAAVEFACKKALKIDGPVLIVTDSFYVAESVNKELPYWQSNGFFNNKKKPLKHVSKWKSIADCIQLKPDIIIIHEKGHQPTASTFHTEGNNLADKLATQGSYVVNAGKRTADGSEFEKRTADGSEFESPKKKAKVE

SEQ ID NO: 6953 - protein, 2094 aa, synthetic construct
MPAAKRVKLDGGDKKYSIGLDIGTNSVGWAVITDEYKVPSKKFKVLGNTDRHSIKKNLIGALLFDSGETAEATRLKRTARRRYTRRKNRICYLQEIFSNEMAKVDDSFFHRLEESFLVEEDKKHERHPIFGNIVDEVAYHEKYPTIYHLRKKLVDSTDKADLRLIYLALAHMIKFRGHFLIEGDLNPDNSDVDKLFIQLVQTYNQLFEENPINASGVDAKAILSARLSKSRRLENLIAQLPGEKKNGLFGNLIALSLGLTPNFKSNFDLAEDAKLQLSKDTYDDDLDNLLAQIGDQYADLFLAAKNLSDAILLSDILRVNTEITKAPLSASMIKRYDEHHQDLTLLKALVRQQLPEKYKEIFFDQSKNGYAGYIDGGASQEEFYKFIKPILEKMDGTEELLVKLNREDLLRKQRTFDNGSIPHQIHLGELHAILRRQEDFYPFLKDNREKIEKILTFRIPYYVGPLARGNSRFAWMTRKSEETITPWNFEEVVDKGASAQSFIERMTNFDKNLPNEKVLPKHSLLYEYFTVYNELTKVKYVTEGMRKPAFLSGEQKKAIVDLLFKTNRKVTVKQLKEDYFKKIECFDSVEISGVEDRFNASLGTYHDLLKIIKDKDFLDNEENEDILEDIVLTLTLFEDREMIEERLKTYAHLFDDKVMKQLKRRRYTGWGRLSRKLINGIRDKQSGKTILDFLKSDGFANRNFMQLIHDDSLTFKEDIQKAQVSGQGDSLHEHIANLAGSPAIKKGILQTVKVVDELVKVMGRHKPENIVIEMARENQTTQKGQKNSRERMKRIEEGIKELGSQILKEHPVENTQLQNEKLYLYYLQNGRDMYVDQELDINRLSDYDVDHIVPQSFLKDDSIDNKVLTRSDKARGKSDNVPSEEVVKKMKNYWRQLLNAKLITQRKFDNLTKAERGGLSELDKAGFIKRQLVETRQITKHVAQILDSRMNTKYDENDKLIREVKVITLKSKLVSDFRKDFQFYKVREINNYHHAHDAYLNAVVGTALIKKYPKLESEFVYGDYKVYDVRKMIAKSEQEIGKATAKYFFYSNIMNFFKTEITLANGEIRKRPLIETNGETGEIVWDKGRDFATVRKVLSMPQVNIVKKTEVQTGGFSKESILPKRNSDKLIARKKDWDPKKYGGFDSPTVAYSVLVVAKVEKGKSKKLKSVKELLGITIMERSSFEKNPIDFLEAKGYKEVKKDLIIKLPKYSLFELENGRKRMLASAGELQKGNELALPSKYVNFLYLASHYEKLKGSPEDNEQKQLFVEQHKHYLDEIIEQISEFSKRVILADANLDKVLSAYNKHRDKPIREQAENIIHLFTLTNLGAPAAFKYFDTTIDRKRYTSTKEVLDATLIHQSITGLYETRIDLSQLGGDGGEAAAKGGSGGGGGVLNLEEEYRLHEKPVPSSIDPSWLQLFPTVWAERAGMGLANQVPPVVVELRSGASPVAVRQYPMSKEAREGIRPHIQRFLDLGVLVPCQSPWNTPLLPVKKPGTNDYRPVQDLREINKRVQDIHPTVPNPYNLLSSLPPSHTWYSVLDLKDAFFCLKLHPNSQPLFAFEWRDPEKGNTGQLTWTRLPQGFKNSPTLFNEALHRDLAPFRALNPQVVLLQYVDDLLVAAPTYRDCKEGTQKLLQELSKLGYRVSAKKAQLCQKEVTYLGYLLKEGKRWLTPARKATVMKIPPPTTPRQVREFLGTAGFCRLWIPGFASLAAPLYPLTKPSIPFIWTEEHQKAFDRIKEALLSAPALALPDLTKPFTLYVDERAGVARGVLTQTLGPWRRPVAYLSKKLDPVASGWPTCLKAVAAVALLLKDADKLTLGQNVTVIASHSLESIVRQPPDRWMTNARMTHYQSLLLNERVSFAPPAVLNPATLLPVESEATPVHRCSEILAEETGTRRDLKDQPLPGVPAWYTDGSSFIAEGKRRAGAAIVDGKRTVWASSLPEGTSAQKAELVALTQALRLAEGKDINIYTDSRYAFATAHIHGAIYKQRGWLTSAGKDIKNKEEILALLEAIHLPKRVAIIHCPGHQKGNDPVATGNRRADEAAKQAALSTRVLAETTKPAGKRTADGSEFEKRTADGSEFESPKKKAKVE

SEQ ID NO: 6954 - protein, 2094 aa, synthetic construct
MPAAKRVKLDGGDKKYSIGLDIGTNSVGWAVITDEYKVPSKKFKVLGNTDRHSIKKNLIGALLFDSGETAEATRLKRTARRRYTRRKNRICYLQEIFSNEMAKVDDSFFHRLEESFLVEEDKKHERHPIFGNIVDEVAYHEKYPTIYHLRKKLVDSTDKADLRLIYLALAHMIKFRGHFLIEGDLNPDNSDVDKLFIQLVQTYNQLFEENPINASGVDAKAILSARLSKSRRLENLIAQLPGEKKNGLFGNLIALSLGLTPNFKSNFDLAEDAKLQLSKDTYDDDLDNLLAQIGDQYADLFLAAKNLSDAILLSDILRVNTEITKAPLSASMIKRYDEHHQDLTLLKALVRQQLPEKYKEIFFDQSKNGYAGYIDGGASQEEFYKFIKPILEKMDGTEELLVKLNREDLLRKQRTFDNGSIPHQIHLGELHAILRRQEDFYPFLKDNREKIEKILTFRIPYYVGPLARGNSRFAWMTRKSEETITPWNFEEVVDKGASAQSFIERMTNFDKNLPNEKVLPKHSLLYEYFTVYNELTKVKYVTEGMRKPAFLSGEQKKAIVDLLFKTNRKVTVKQLKEDYFKKIECFDSVEISGVEDRFNASLGTYHDLLKIIKDKDFLDNEENEDILEDIVLTLTLFEDREMIEERLKTYAHLFDDKVMKQLKRRRYTGWGRLSRKLINGIRDKQSGKTILDFLKSDGFANRNFMQLIHDDSLTFKEDIQKAQVSGQGDSLHEHIANLAGSPAIKKGILQTVKVVDELVKVMGRHKPENIVIEMARENQTTQKGQKNSRERMKRIEEGIKELGSQILKEHPVENTQLQNEKLYLYYLQNGRDMYVDQELDINRLSDYDVDHIVPQSFLKDDSIDNKVLTRSDKARGKSDNVPSEEVVKKMKNYWRQLLNAKLITQRKFDNLTKAERGGLSELDKAGFIKRQLVETRQITKHVAQILDSRMNTKYDENDKLIREVKVITLKSKLVSDFRKDFQFYKVREINNYHHAHDAYLNAVVGTALIKKYPKLESEFVYGDYKVYDVRKMIAKSEQEIGKATAKYFFYSNIMNFFKTEITLANGEIRKRPLIETNGETGEIVWDKGRDFATVRKVLSMPQVNIVKKTEVQTGGFSKESILPKRNSDKLIARKKDWDPKKYGGFDSPTVAYSVLVVAKVEKGKSKKLKSVKELLGITIMERSSFEKNPIDFLEAKGYKEVKKDLIIKLPKYSLFELENGRKRMLASAGELQKGNELALPSKYVNFLYLASHYEKLKGSPEDNEQKQLFVEQHKHYLDEIIEQISEFSKRVILADANLDKVLSAYNKHRDKPIREQAENIIHLFTLTNLGAPAAFKYFDTTIDRKRYTSTKEVLDATLIHQSITGLYETRIDLSQLGGDGGEAAAKGGSGGGGGVLNLEEEYRLHEKPVPSSIDPSWLQLFPTVWAERAGMGLANQVPPVVVELRSGASPVAVRQYPMSKEAREGIRPHIQRFLDLGVLVPCQSPWNTPLLPVKKPGTNDYRPVQDLREINKRVQDIHPTVPNPYNLLSSLPPSHTWYSVLDLKDAFFCLKLHPNSQPLFAFEWRDPEKGNTGQLTWTRLPQGFKNSPTLFNEALHRDLAPFRALNPQVVLLQYVDDLLVAAPTYRDCKEGTQKLLQELSKLGYRVSAKKAQLCQKEVTYLGYLLKEGKRWLTPARKATVMKIPPPTTPRQVREFLGKAGFCRLFIPGFASLAAPLYPLTKPSIPFIWTEEHQKAFDRIKEALLSAPALALPDLTKPFTLYVDERAGVARGVLTQTLGPWRRPVAYLSKKLDPVASGWPTCLKAVAAVALLLKDADKLTLGQNVTVIASHSLESIVRQPPDRWMTNARMTHYQSLLLNERVSFAPPAVLNPATLLPVESEATPVHRCSEILAEETGTRRDLKDQPLPGVPAWYTDGSSFIAEGKRRAGAAIVDGKRTVWASSLPEGTSAQKAELVALTQALRLAEGKDINIYTDSRYAFATAHIHGAIYKQRGWLTSAGKDIKNKEEILALLEAIHLPKRVAIIHCPGHQKGNDPVATGNRRADEAAKQAALSTRVLAETTKPAGKRTADGSEFEKRTADGSEFESPKKKAKVE

SEQ ID NO: 6955 - protein, 2096 aa, synthetic construct
MPAAKRVKLDGGDKKYSIGLDIGTNSVGWAVITDEYKVPSKKFKVLGNTDRHSIKKNLIGALLFDSGETAEATRLKRTARRRYTRRKNRICYLQEIFSNEMAKVDDSFFHRLEESFLVEEDKKHERHPIFGNIVDEVAYHEKYPTIYHLRKKLVDSTDKADLRLIYLALAHMIKFRGHFLIEGDLNPDNSDVDKLFIQLVQTYNQLFEENPINASGVDAKAILSARLSKSRRLENLIAQLPGEKKNGLFGNLIALSLGLTPNFKSNFDLAEDAKLQLSKDTYDDDLDNLLAQIGDQYADLFLAAKNLSDAILLSDILRVNTEITKAPLSASMIKRYDEHHQDLTLLKALVRQQLPEKYKEIFFDQSKNGYAGYIDGGASQEEFYKFIKPILEKMDGTEELLVKLNREDLLRKQRTFDNGSIPHQIHLGELHAILRRQEDFYPFLKDNREKIEKILTFRIPYYVGPLARGNSRFAWMTRKSEETITPWNFEEVVDKGASAQSFIERMTNFDKNLPNEKVLPKHSLLYEYFTVYNELTKVKYVTEGMRKPAFLSGEQKKAIVDLLFKTNRKVTVKQLKEDYFKKIECFDSVEISGVEDRFNASLGTYHDLLKIIKDKDFLDNEENEDILEDIVLTLTLFEDREMIEERLKTYAHLFDDKVMKQLKRRRYTGWGRLSRKLINGIRDKQSGKTILDFLKSDGFANRNFMQLIHDDSLTFKEDIQKAQVSGQGDSLHEHIANLAGSPAIKKGILQTVKVVDELVKVMGRHKPENIVIEMARENQTTQKGQKNSRERMKRIEEGIKELGSQILKEHPVENTQLQNEKLYLYYLQNGRDMYVDQELDINRLSDYDVDHIVPQSFLKDDSIDNKVLTRSDKARGKSDNVPSEEVVKKMKNYWRQLLNAKLITQRKFDNLTKAERGGLSELDKAGFIKRQLVETRQITKHVAQILDSRMNTKYDENDKLIREVKVITLKSKLVSDFRKDFQFYKVREINNYHHAHDAYLNAVVGTALIKKYPKLESEFVYGDYKVYDVRKMIAKSEQEIGKATAKYFFYSNIMNFFKTEITLANGEIRKRPLIETNGETGEIVWDKGRDFATVRKVLSMPQVNIVKKTEVQTGGFSKESILPKRNSDKLIARKKDWDPKKYGGFDSPTVAYSVLVVAKVEKGKSKKLKSVKELLGITIMERSSFEKNPIDFLEAKGYKEVKKDLIIKLPKYSLFELENGRKRMLASAGELQKGNELALPSKYVNFLYLASHYEKLKGSPEDNEQKQLFVEQHKHYLDEIIEQISEFSKRVILADANLDKVLSAYNKHRDKPIREQAENIIHLFTLTNLGAPAAFKYFDTTIDRKRYTSTKEVLDATLIHQSITGLYETRIDLSQLGGDGGEAAAKGGSGGGGGTLNIEDEYRLHETSKEPDVPLGSTWLSDFPQAWAETGGMGLAVRQAPLIIPLKATSTPVSIKQYPMSQEARLGIKPHIQRLLDQGILVPCQSPWNTPLLPVKKPGTNDYRPVQDLREVNKRVEDIHPTVPNPYNLLSGLPPSHQWYTVLDLKDAFFCLRLHPTSQPLFAFEWRDPEMGISGQLTWTRLPQGFKNSPTLFDEALHRDLADFRIQHPDLILLQYVDDLLLAATSEQDCQRGTRALLQTLGNLGYRASAKKAQICQKQVKYLGYLLKEGQRWLTEARKETVMGQPTPKTPRQLREFLGTAGFCRLWIPGFAEMAAPLYPLTKTGTLFNWGPDQQKAYQEIKQALLTAPALGLPDLTKPFELFVDEKQGYAKGVLTQKLGPWRRPVAYLSKKLDPVAAGWPPCLRMVAAIAVLTKDAGKLTMGQPLVILAPHAVEALVKQPPDRWLSNARMTHYQAMLLDTDRVQFGPVVALNPATLLPLPEKEAPHDCLEILAETHGTRPDLTDQPIPDADYTWYTDGSSFLQEGQRRAGAAVTTETEVIWARALPAGTSAQRAELIALTQALKMAEGKKLNVYTDSRYAFATAHVHGEIYRRRGLLTSEGREIKNKNEILALLKALFLPKRLSIIHCPGHQKGNSAEARGNRMADQAAREAAMKAVLETSTLLAGKRTADGSEFEKRTADGSEFESPKKKAKVE

SEQ ID NO: 6956 - protein, 2096 aa, synthetic construct
MPAAKRVKLDGGDKKYSIGLDIGTNSVGWAVITDEYKVPSKKFKVLGNTDRHSIKKNLIGALLFDSGETAEATRLKRTARRRYTRRKNRICYLQEIFSNEMAKVDDSFFHRLEESFLVEEDKKHERHPIFGNIVDEVAYHEKYPTIYHLRKKLVDSTDKADLRLIYLALAHMIKFRGHFLIEGDLNPDNSDVDKLFIQLVQTYNQLFEENPINASGVDAKAILSARLSKSRRLENLIAQLPGEKKNGLFGNLIALSLGLTPNFKSNFDLAEDAKLQLSKDTYDDDLDNLLAQIGDQYADLFLAAKNLSDAILLSDILRVNTEITKAPLSASMIKRYDEHHQDLTLLKALVRQQLPEKYKEIFFDQSKNGYAGYIDGGASQEEFYKFIKPILEKMDGTEELLVKLNREDLLRKQRTFDNGSIPHQIHLGELHAILRRQEDFYPFLKDNREKIEKILTFRIPYYVGPLARGNSRFAWMTRKSEETITPWNFEEVVDKGASAQSFIERMTNFDKNLPNEKVLPKHSLLYEYFTVYNELTKVKYVTEGMRKPAFLSGEQKKAIVDLLFKTNRKVTVKQLKEDYFKKIECFDSVEISGVEDRFNASLGTYHDLLKIIKDKDFLDNEENEDILEDIVLTLTLFEDREMIEERLKTYAHLFDDKVMKQLKRRRYTGWGRLSRKLINGIRDKQSGKTILDFLKSDGFANRNFMQLIHDDSLTFKEDIQKAQVSGQGDSLHEHIANLAGSPAIKKGILQTVKVVDELVKVMGRHKPENIVIEMARENQTTQKGQKNSRERMKRIEEGIKELGSQILKEHPVENTQLQNEKLYLYYLQNGRDMYVDQELDINRLSDYDVDHIVPQSFLKDDSIDNKVLTRSDKARGKSDNVPSEEVVKKMKNYWRQLLNAKLITQRKFDNLTKAERGGLSELDKAGFIKRQLVETRQITKHVAQILDSRMNTKYDENDKLIREVKVITLKSKLVSDFRKDFQFYKVREINNYHHAHDAYLNAVVGTALIKKYPKLESEFVYGDYKVYDVRKMIAKSEQEIGKATAKYFFYSNIMNFFKTEITLANGEIRKRPLIETNGETGEIVWDKGRDFATVRKVLSMPQVNIVKKTEVQTGGFSKESILPKRNSDKLIARKKDWDPKKYGGFDSPTVAYSVLVVAKVEKGKSKKLKSVKELLGITIMERSSFEKNPIDFLEAKGYKEVKKDLIIKLPKYSLFELENGRKRMLASAGELQKGNELALPSKYVNFLYLASHYEKLKGSPEDNEQKQLFVEQHKHYLDEIIEQISEFSKRVILADANLDKVLSAYNKHRDKPIREQAENIIHLFTLTNLGAPAAFKYFDTTIDRKRYTSTKEVLDATLIHQSITGLYETRIDLSQLGGDGGEAAAKGGSGGGGGTLNIEDEYRLHETSKEPDVPLGSTWLSDFPQAWAETGGMGLAVRQAPLIIPLKATSTPVSIKQYPMSQEARLGIKPHIQRLLDQGILVPCQSPWNTPLLPVKKPGTNDYRPVQDLREVNKRVEDIHPTVPNPYNLLSGLPPSHQWYTVLDLKDAFFCLRLHPTSQPLFAFEWRDPEMGISGQLTWTRLPQGFKNSPTLFNEALHRDLADFRIQHPDLILLQYVDDLLLAATSEQDCQRGTRALLQTLGNLGYRASAKKAQICQKQVKYLGYLLKEGQRWLTEARKETVMGQPTPKTPRQLREFLGTAGFCRLWIPGFAEMAAPLYPLTKPGTLFNWGPDQQKAYQEIKQALLTAPALGLPDLTKPFELFVDEKQGYAKGVLTQKLGPWRRPVAYLSKKLDPVAAGWPPCLRMVAAIAVLTKDAGKLTMGQPLVILAPHAVEALVKQPPDRWLSNARMTHYQAMLLDTDRVQFGPVVALNPATLLPLPEKEAPHDCLEILAETHGTRPDLTDQPIPDADYTWYTDGSSFLQEGQRRAGAAVTTETEVIWARALPAGTSAQRAELIALTQALKMAEGKKLNVYTDSRYAFATAHVHGEIYRRRGWLTSEGREIKNKNEILALLKALFLPKRLSIIHCPGHQKGNSAEARGNRMADQAAREAAMKAVLETSTLLAGKRTADGSEFEKRTADGSEFESPKKKAKVE

SEQ ID NO: 6957 - protein, 2102 aa, synthetic construct
MPAAKRVKLDGGDKKYSIGLDIGTNSVGWAVITDEYKVPSKKFKVLGNTDRHSIKKNLIGALLFDSGETAEATRLKRTARRRYTRRKNRICYLQEIFSNEMAKVDDSFFHRLEESFLVEEDKKHERHPIFGNIVDEVAYHEKYPTIYHLRKKLVDSTDKADLRLIYLALAHMIKFRGHFLIEGDLNPDNSDVDKLFIQLVQTYNQLFEENPINASGVDAKAILSARLSKSRRLENLIAQLPGEKKNGLFGNLIALSLGLTPNFKSNFDLAEDAKLQLSKDTYDDDLDNLLAQIGDQYADLFLAAKNLSDAILLSDILRVNTEITKAPLSASMIKRYDEHHQDLTLLKALVRQQLPEKYKEIFFDQSKNGYAGYIDGGASQEEFYKFIKPILEKMDGTEELLVKLNREDLLRKQRTFDNGSIPHQIHLGELHAILRRQEDFYPFLKDNREKIEKILTFRIPYYVGPLARGNSRFAWMTRKSEETITPWNFEEVVDKGASAQSFIERMTNFDKNLPNEKVLPKHSLLYEYFTVYNELTKVKYVTEGMRKPAFLSGEQKKAIVDLLFKTNRKVTVKQLKEDYFKKIECFDSVEISGVEDRFNASLGTYHDLLKIIKDKDFLDNEENEDILEDIVLTLTLFEDREMIEERLKTYAHLFDDKVMKQLKRRRYTGWGRLSRKLINGIRDKQSGKTILDFLKSDGFANRNFMQLIHDDSLTFKEDIQKAQVSGQGDSLHEHIANLAGSPAIKKGILQTVKVVDELVKVMGRHKPENIVIEMARENQTTQKGQKNSRERMKRIEEGIKELGSQILKEHPVENTQLQNEKLYLYYLQNGRDMYVDQELDINRLSDYDVDHIVPQSFLKDDSIDNKVLTRSDKARGKSDNVPSEEVVKKMKNYWRQLLNAKLITQRKFDNLTKAERGGLSELDKAGFIKRQLVETRQITKHVAQILDSRMNTKYDENDKLIREVKVITLKSKLVSDFRKDFQFYKVREINNYHHAHDAYLNAVVGTALIKKYPKLESEFVYGDYKVYDVRKMIAKSEQEIGKATAKYFFYSNIMNFFKTEITLANGEIRKRPLIETNGETGEIVWDKGRDFATVRKVLSMPQVNIVKKTEVQTGGFSKESILPKRNSDKLIARKKDWDPKKYGGFDSPTVAYSVLVVAKVEKGKSKKLKSVKELLGITIMERSSFEKNPIDFLEAKGYKEVKKDLIIKLPKYSLFELENGRKRMLASAGELQKGNELALPSKYVNFLYLASHYEKLKGSPEDNEQKQLFVEQHKHYLDEIIEQISEFSKRVILADANLDKVLSAYNKHRDKPIREQAENIIHLFTLTNLGAPAAFKYFDTTIDRKRYTSTKEVLDATLIHQSITGLYETRIDLSQLGGDGGEAAAKGGGGGSGGTVSLQDEHRLFDIPVTTSLPDVWLQDFPQAWAETGGLGRAKCQAPIIIDLKPTAVPVSIKQYPMSLEAHMGIRQHIIKFLELGVLRPCRSPWNTPLLPVKKPGTQDYRPVQDLREINKRTVDIHPTVPNPYNLLSTLKPDYSWYTVLDLKDAFFCLPLAPQSQELFAFEWKDPERGISGQLTWTRLPQGFKNSPTLFNEALHRDLTDFRTQHPEVTLLQYVDDLLLAAPTKKACTQGTRHLLQELGEKGYRASAKKAQICQTKVTYLGYILSEGKRWLTPGRIETVARIPPPRNPREVREFLGKAGFCRLFIPGFAELAAPLYALTKPSTPFTWQTEHQLAFEALKKALLSAPALGLPDTSKPFTLFLDERQGIAKGVLTQKLGPWKRPVAYLSKKLDPVAAGWPPCLRIMAATAMLVKDSAKLTLGQPLTVITPHTLEAIVRQPPDRWITNARLTHYQALLLDTDRVQFGPPVTLNPATLLPVPENQPSPHDCRQVLAETHGTREDLKDQELPDADHTWYTDGSSYLDSGTRRAGAAVVDGHNTIWAQSLPPGTSAQKAELIALTKALELSKGKKANIYTDSRYAFATAHTHGSIYERRGWLTSEGKEIKNKAEIIALLKALFLPQEVAIIHCPGHQKGQDPVAVGNRQADRVARQAAMAEVLTLATEPDNTSHITAGKRTADGSEFEKRTADGSEFESPKKKAKVE

SEQ ID NO: 6958 - protein, 2095 aa, synthetic construct
MPAAKRVKLDGGDKKYSIGLDIGTNSVGWAVITDEYKVPSKKFKVLGNTDRHSIKKNLIGALLFDSGETAEATRLKRTARRRYTRRKNRICYLQEIFSNEMAKVDDSFFHRLEESFLVEEDKKHERHPIFGNIVDEVAYHEKYPTIYHLRKKLVDSTDKADLRLIYLALAHMIKFRGHFLIEGDLNPDNSDVDKLFIQLVQTYNQLFEENPINASGVDAKAILSARLSKSRRLENLIAQLPGEKKNGLFGNLIALSLGLTPNFKSNFDLAEDAKLQLSKDTYDDDLDNLLAQIGDQYADLFLAAKNLSDAILLSDILRVNTEITKAPLSASMIKRYDEHHQDLTLLKALVRQQLPEKYKEIFFDQSKNGYAGYIDGGASQEEFYKFIKPILEKMDGTEELLVKLNREDLLRKQRTFDNGSIPHQIHLGELHAILRRQEDFYPFLKDNREKIEKILTFRIPYYVGPLARGNSRFAWMTRKSEETITPWNFEEVVDKGASAQSFIERMTNFDKNLPNEKVLPKHSLLYEYFTVYNELTKVKYVTEGMRKPAFLSGEQKKAIVDLLFKTNRKVTVKQLKEDYFKKIECFDSVEISGVEDRFNASLGTYHDLLKIIKDKDFLDNEENEDILEDIVLTLTLFEDREMIEERLKTYAHLFDDKVMKQLKRRRYTGWGRLSRKLINGIRDKQSGKTILDFLKSDGFANRNFMQLIHDDSLTFKEDIQKAQVSGQGDSLHEHIANLAGSPAIKKGILQTVKVVDELVKVMGRHKPENIVIEMARENQTTQKGQKNSRERMKRIEEGIKELGSQILKEHPVENTQLQNEKLYLYYLQNGRDMYVDQELDINRLSDYDVDHIVPQSFLKDDSIDNKVLTRSDKARGKSDNVPSEEVVKKMKNYWRQLLNAKLITQRKFDNLTKAERGGLSELDKAGFIKRQLVETRQITKHVAQILDSRMNTKYDENDKLIREVKVITLKSKLVSDFRKDFQFYKVREINNYHHAHDAYLNAVVGTALIKKYPKLESEFVYGDYKVYDVRKMIAKSEQEIGKATAKYFFYSNIMNFFKTEITLANGEIRKRPLIETNGETGEIVWDKGRDFATVRKVLSMPQVNIVKKTEVQTGGFSKESILPKRNSDKLIARKKDWDPKKYGGFDSPTVAYSVLVVAKVEKGKSKKLKSVKELLGITIMERSSFEKNPIDFLEAKGYKEVKKDLIIKLPKYSLFELENGRKRMLASAGELQKGNELALPSKYVNFLYLASHYEKLKGSPEDNEQKQLFVEQHKHYLDEIIEQISEFSKRVILADANLDKVLSAYNKHRDKPIREQAENIIHLFTLTNLGAPAAFKYFDTTIDRKRYTSTKEVLDATLIHQSITGLYETRIDLSQLGGDGGEAAAKGGGGGSGGTLQLEEEYRLFEPESTQKQEMDIWLKNFPQAWAETGGMGTAHCQAPVLIQLKATATPISIRQYPMPHEAYQGIKPHIRRMLDQGILKPCQSPWNTPLLPVKKPGTEDYRPVQDLREVNKRVEDIHPTVPNPYNLLSTLPPSHPWYTVLDLKDAFFCLRLHSESQLLFAFEWRDPEIGLSGQLTWTRLPQGFKNSPTLFNEALHSDLADFRVRYPALVLLQYVDDLLLAAATRTECLEGTKALLETLGNKGYRASAKKAQICLQEVTYLGYSLKDGQRWLTKARKEAILSIPVPKNSRQVREFLGTAGYCRLWIPGFAELAAPLYPLTRPGTLFQWGTEQQLAFEDIKKALLSSPALGLPDITKPFELFIDENSGFAKGVLVQKLGPWKRPVAYLSKKLDTVASGWPPCLRMVAAIAILVKDAGKLTLGQPLTILTSHPVEALVRQPPNKWLSNARMTHYQAMLLDAERVHFGPTVSLNPATLLPLPSGGNHHDCLQILAETHGTRPDLTDQPLPDADLTWYTDGSSFIRNGEREAGAAVTTESEVIWAAPLPPGTSAQRAELIALTQALKMAEGKKLTVYTDSRYAFATTHVHGEIYRRRGWLTSEGKEIKNKNEILALLEALFLPKRLSIIHCPGHQKGDSPQAKGNRLADDTAKKAATETHSSLTVLPAGKRTADGSEFEKRTADGSEFESPKKKAKVE

SEQ ID NO: 6959 - protein, 2087 aa, synthetic construct
MPAAKRVKLDGGDKKYSIGLDIGTNSVGWAVITDEYKVPSKKFKVLGNTDRHSIKKNLIGALLFDSGETAEATRLKRTARRRYTRRKNRICYLQEIFSNEMAKVDDSFFHRLEESFLVEEDKKHERHPIFGNIVDEVAYHEKYPTIYHLRKKLVDSTDKADLRLIYLALAHMIKFRGHFLIEGDLNPDNSDVDKLFIQLVQTYNQLFEENPINASGVDAKAILSARLSKSRRLENLIAQLPGEKKNGLFGNLIALSLGLTPNFKSNFDLAEDAKLQLSKDTYDDDLDNLLAQIGDQYADLFLAAKNLSDAILLSDILRVNTEITKAPLSASMIKRYDEHHQDLTLLKALVRQQLPEKYKEIFFDQSKNGYAGYIDGGASQEEFYKFIKPILEKMDGTEELLVKLNREDLLRKQRTFDNGSIPHQIHLGELHAILRRQEDFYPFLKDNREKIEKILTFRIPYYVGPLARGNSRFAWMTRKSEETITPWNFEEVVDKGASAQSFIERMTNFDKNLPNEKVLPKHSLLYEYFTVYNELTKVKYVTEGMRKPAFLSGEQKKAIVDLLFKTNRKVTVKQLKEDYFKKIECFDSVEISGVEDRFNASLGTYHDLLKIIKDKDFLDNEENEDILEDIVLTLTLFEDREMIEERLKTYAHLFDDKVMKQLKRRRYTGWGRLSRKLINGIRDKQSGKTILDFLKSDGFANRNFMQLIHDDSLTFKEDIQKAQVSGQGDSLHEHIANLAGSPAIKKGILQTVKVVDELVKVMGRHKPENIVIEMARENQTTQKGQKNSRERMKRIEEGIKELGSQILKEHPVENTQLQNEKLYLYYLQNGRDMYVDQELDINRLSDYDVDHIVPQSFLKDDSIDNKVLTRSDKARGKSDNVPSEEVVKKMKNYWRQLLNAKLITQRKFDNLTKAERGGLSELDKAGFIKRQLVETRQITKHVAQILDSRMNTKYDENDKLIREVKVITLKSKLVSDFRKDFQFYKVREINNYHHAHDAYLNAVVGTALIKKYPKLESEFVYGDYKVYDVRKMIAKSEQEIGKATAKYFFYSNIMNFFKTEITLANGEIRKRPLIETNGETGEIVWDKGRDFATVRKVLSMPQVNIVKKTEVQTGGFSKESILPKRNSDKLIARKKDWDPKKYGGFDSPTVAYSVLVVAKVEKGKSKKLKSVKELLGITIMERSSFEKNPIDFLEAKGYKEVKKDLIIKLPKYSLFELENGRKRMLASAGELQKGNELALPSKYVNFLYLASHYEKLKGSPEDNEQKQLFVEQHKHYLDEIIEQISEFSKRVILADANLDKVLSAYNKHRDKPIREQAENIIHLFTLTNLGAPAAFKYFDTTIDRKRYTSTKEVLDATLIHQSITGLYETRIDLSQLGGDGGEAAAKGGGGGSGGVPWLTQQPLQLTILVPLQEYQEKILSKTALPEDQKQQLKTLFVKYDNLWQHWENQVGHRKIRPHNIATGDYPPRPQKQYPINPKAKPSIQIVIDDLLKQGVLTPQNSTMNTPVYPVPKPDGRWRMVLDYREVNKTIPLTAAQNQHSAGILATIVRQKYKTTLDLANGFWAHPITPESYWLTAFTWQGKQYCWTRLPQGFLNSPALFNADVVDLLKEIPNVQVYVDDIYLSHDDPKEHVQQLEKVFQILLQAGYVVSLKKSEIGQKTVEFLGFNITKEGRGLTDTFKTKLLNITPPKDLKQLQSILGKLNFARNFIPNFAELVQPLYNLIAPAKGKYIEWSEENTKQLNMVIEALNTASNLEERLPEQRLVIKVNTSPSAGYVRYYNETGKKPIMYLNYVFSKAELKFSMLEKLLTTMHKALIKAMDLAMGQEILVYSPIVSMTKIQKTPLPERKALPIRWITWMTYLEDPRIQFHYDKTLPELKHIPDVYTSSQSPVKHPSQYEGVFYTDGSAIKSPDPTKSNNAGMGIVHATYKPEYQVLNQWSIPLGNHTAQMAEIAAVEFACKKALKIPGPVLVITDSFYVAESANKELPYWKSNGFVNNKKKPLKHISKWKSIAECLSMKPDITIQHEKGISLQIPVFILKGNALADKLATQGSYVVNAGKRTADGSEFEKRTADGSEFESPKKKAKVE

SEQ ID NO: 6960 - protein, 2218 aa, synthetic construct
MPAAKRVKLDGGDKKYSIGLDIGTNSVGWAVITDEYKVPSKKFKVLGNTDRHSIKKNLIGALLFDSGETAEATRLKRTARRRYTRRKNRICYLQEIFSNEMAKVDDSFFHRLEESFLVEEDKKHERHPIFGNIVDEVAYHEKYPTIYHLRKKLVDSTDKADLRLIYLALAHMIKFRGHFLIEGDLNPDNSDVDKLFIQLVQTYNQLFEENPINASGVDAKAILSARLSKSRRLENLIAQLPGEKKNGLFGNLIALSLGLTPNFKSNFDLAEDAKLQLSKDTYDDDLDNLLAQIGDQYADLFLAAKNLSDAILLSDILRVNTEITKAPLSASMIKRYDEHHQDLTLLKALVRQQLPEKYKEIFFDQSKNGYAGYIDGGASQEEFYKFIKPILEKMDGTEELLVKLNREDLLRKQRTFDNGSIPHQIHLGELHAILRRQEDFYPFLKDNREKIEKILTFRIPYYVGPLARGNSRFAWMTRKSEETITPWNFEEVVDKGASAQSFIERMTNFDKNLPNEKVLPKHSLLYEYFTVYNELTKVKYVTEGMRKPAFLSGEQKKAIVDLLFKTNRKVTVKQLKEDYFKKIECFDSVEISGVEDRFNASLGTYHDLLKIIKDKDFLDNEENEDILEDIVLTLTLFEDREMIEERLKTYAHLFDDKVMKQLKRRRYTGWGRLSRKLINGIRDKQSGKTILDFLKSDGFANRNFMQLIHDDSLTFKEDIQKAQVSGQGDSLHEHIANLAGSPAIKKGILQTVKVVDELVKVMGRHKPENIVIEMARENQTTQKGQKNSRERMKRIEEGIKELGSQILKEHPVENTQLQNEKLYLYYLQNGRDMYVDQELDINRLSDYDVDHIVPQSFLKDDSIDNKVLTRSDKARGKSDNVPSEEVVKKMKNYWRQLLNAKLITQRKFDNLTKAERGGLSELDKAGFIKRQLVETRQITKHVAQILDSRMNTKYDENDKLIREVKVITLKSKLVSDFRKDFQFYKVREINNYHHAHDAYLNAVVGTALIKKYPKLESEFVYGDYKVYDVRKMIAKSEQEIGKATAKYFFYSNIMNFFKTEITLANGEIRKRPLIETNGETGEIVWDKGRDFATVRKVLSMPQVNIVKKTEVQTGGFSKESILPKRNSDKLIARKKDWDPKKYGGFDSPTVAYSVLVVAKVEKGKSKKLKSVKELLGITIMERSSFEKNPIDFLEAKGYKEVKKDLIIKLPKYSLFELENGRKRMLASAGELQKGNELALPSKYVNFLYLASHYEKLKGSPEDNEQKQLFVEQHKHYLDEIIEQISEFSKRVILADANLDKVLSAYNKHRDKPIREQAENIIHLFTLTNLGAPAAFKYFDTTIDRKRYTSTKEVLDATLIHQSITGLYETRIDLSQLGGDGGEAAAKGGGGGSGGTLGDQGSRGSDPLPEPRVTLTVEGIPTEFLVNTGAEHSVLTKPMGKMGSKRTVVAGATGSKVYPWTTKRLLKIGQKQVTHSFLVIPECPAPLLGRDLLTKLKAQIQFSTEGPQVTWEDRPAMCLVLNLEEEYRLHEKPVPPSIDPSWLQLFPMVWAEKAGMGLANQVPPVVVELKSDASPVAVRQYPMSKEAREGIRPHIQRFLDLGILVPCQSPWNTPLLPVKKPGTNDYRPVQDLREVNKRVQDIHPTVPNPYNLLSSLPPSHTWYSVLDLKDAFFCLKLHPNSQPLFAFEWRDPEKGNTGQLTWTRLPQGFKNSPTLFDEALHRDLASFRALNPQVVMLQYVDDLLVAAPTYRDCKEGTRRLLQELSKLGYRVSAKKAQLCREEVTYLGYLLKGGKRWLTPARKATVMKIPTPTTPRQVREFLGTAGFCRLWIPGFASLAAPLYPLTREKVPFTWTEAHQEAFGRIKEALLSAPALALPDLTKPFALYVDEKEGVARGVLTQTLGPWRRPVAYLSKKLDPVASGWPTCLKAIAAVALLLKDADKLTLGQNVLVIAPHNLESIVRQPPDRWMTNARMTHYQSLLLNERVSFAPPAILNPATLLPVESDDTPIHICSEILAEETGTRPDLRDQPLPGVPAWYTDGSSFIMDGRRQAGAAIVDNKRTVWASNLPEGTSAQKAELIALTQALRLAEGKSINIYTDSRYAFATAHVHGAIYKQRGLLTSAGKDIKNKEEILALLEAIHLPKRVAIIHCPGHQRGTDPVATGNRKADEAAKQAAQSTRILTETTKNAGKRTADGSEFEKRTADGSEFESPKKKAKVE

SEQ ID NO: 6961 - protein, 2218 aa, synthetic construct
MPAAKRVKLDGGDKKYSIGLDIGTNSVGWAVITDEYKVPSKKFKVLGNTDRHSIKKNLIGALLFDSGETAEATRLKRTARRRYTRRKNRICYLQEIFSNEMAKVDDSFFHRLEESFLVEEDKKHERHPIFGNIVDEVAYHEKYPTIYHLRKKLVDSTDKADLRLIYLALAHMIKFRGHFLIEGDLNPDNSDVDKLFIQLVQTYNQLFEENPINASGVDAKAILSARLSKSRRLENLIAQLPGEKKNGLFGNLIALSLGLTPNFKSNFDLAEDAKLQLSKDTYDDDLDNLLAQIGDQYADLFLAAKNLSDAILLSDILRVNTEITKAPLSASMIKRYDEHHQDLTLLKALVRQQLPEKYKEIFFDQSKNGYAGYIDGGASQEEFYKFIKPILEKMDGTEELLVKLNREDLLRKQRTFDNGSIPHQIHLGELHAILRRQEDFYPFLKDNREKIEKILTFRIPYYVGPLARGNSRFAWMTRKSEETITPWNFEEVVDKGASAQSFIERMTNFDKNLPNEKVLPKHSLLYEYFTVYNELTKVKYVTEGMRKPAFLSGEQKKAIVDLLFKTNRKVTVKQLKEDYFKKIECFDSVEISGVEDRFNASLGTYHDLLKIIKDKDFLDNEENEDILEDIVLTLTLFEDREMIEERLKTYAHLFDDKVMKQLKRRRYTGWGRLSRKLINGIRDKQSGKTILDFLKSDGFANRNFMQLIHDDSLTFKEDIQKAQVSGQGDSLHEHIANLAGSPAIKKGILQTVKVVDELVKVMGRHKPENIVIEMARENQTTQKGQKNSRERMKRIEEGIKELGSQILKEHPVENTQLQNEKLYLYYLQNGRDMYVDQELDINRLSDYDVDHIVPQSFLKDDSIDNKVLTRSDKARGKSDNVPSEEVVKKMKNYWRQLLNAKLITQRKFDNLTKAERGGLSELDKAGFIKRQLVETRQITKHVAQILDSRMNTKYDENDKLIREVKVITLKSKLVSDFRKDFQFYKVREINNYHHAHDAYLNAVVGTALIKKYPKLESEFVYGDYKVYDVRKMIAKSEQEIGKATAKYFFYSNIMNFFKTEITLANGEIRKRPLIETNGETGEIVWDKGRDFATVRKVLSMPQVNIVKKTEVQTGGFSKESILPKRNSDKLIARKKDWDPKKYGGFDSPTVAYSVLVVAKVEKGKSKKLKSVKELLGITIMERSSFEKNPIDFLEAKGYKEVKKDLIIKLPKYSLFELENGRKRMLASAGELQKGNELALPSKYVNFLYLASHYEKLKGSPEDNEQKQLFVEQHKHYLDEIIEQISEFSKRVILADANLDKVLSAYNKHRDKPIREQAENIIHLFTLTNLGAPAAFKYFDTTIDRKRYTSTKEVLDATLIHQSITGLYETRIDLSQLGGDGGEAAAKGGGGGSGGTLGDQGSRGSDPLPEPRVTLTVEGIPTEFLVNTGAEHSVLTKPMGKMGSKRTVVAGATGSKVYPWTTKRLLKIGQKQVTHSFLVIPECPAPLLGRDLLTKLKAQIQFSTEGPQVTWEDRPAMCLVLNLEEEYRLHEKPVPPSIDPSWLQLFPMVWAEKAGMGLANQVPPVVVELKSDASPVAVRQYPMSKEAREGIRPHIQRFLDLGILVPCQSPWNTPLLPVKKPGTNDYRPVQDLREVNKRVQDIHPTVPNPYNLLSSLPPSHTWYSVLDLKDAFFCLKLHPNSQPLFAFEWRDPEKGNTGQLTWTRLPQGFKNSPTLFNEALHRDLASFRALNPQVVMLQYVDDLLVAAPTYRDCKEGTRRLLQELSKLGYRVSAKKAQLCREEVTYLGYLLKGGKRWLTPARKATVMKIPTPTTPRQVREFLGTAGFCRLWIPGFASLAAPLYPLTRPKVPFTWTEAHQEAFGRIKEALLSAPALALPDLTKPFALYVDEKEGVARGVLTQTLGPWRRPVAYLSKKLDPVASGWPTCLKAIAAVALLLKDADKLTLGQNVLVIAPHNLESIVRQPPDRWMTNARMTHYQSLLLNERVSFAPPAILNPATLLPVESDDTPIHICSEILAEETGTRPDLRDQPLPGVPAWYTDGSSFIMDGRRQAGAAIVDNKRTVWASNLPEGTSAQKAELIALTQALRLAEGKSINIYTDSRYAFATAHVHGAIYKQRGWLTSAGKDIKNKEEILALLEAIHLPKRVAIIHCPGHQRGTDPVATGNRKADEAAKQAAQSTRILTETTKNAGKRTADGSEFEKRTADGSEFESPKKKAKVE

SEQ ID NO: 6962 - protein, 2218 aa, synthetic construct
MPAAKRVKLDGGDKKYSIGLDIGTNSVGWAVITDEYKVPSKKFKVLGNTDRHSIKKNLIGALLFDSGETAEATRLKRTARRRYTRRKNRICYLQEIFSNEMAKVDDSFFHRLEESFLVEEDKKHERHPIFGNIVDEVAYHEKYPTIYHLRKKLVDSTDKADLRLIYLALAHMIKFRGHFLIEGDLNPDNSDVDKLFIQLVQTYNQLFEENPINASGVDAKAILSARLSKSRRLENLIAQLPGEKKNGLFGNLIALSLGLTPNFKSNFDLAEDAKLQLSKDTYDDDLDNLLAQIGDQYADLFLAAKNLSDAILLSDILRVNTEITKAPLSASMIKRYDEHHQDLTLLKALVRQQLPEKYKEIFFDQSKNGYAGYIDGGASQEEFYKFIKPILEKMDGTEELLVKLNREDLLRKQRTFDNGSIPHQIHLGELHAILRRQEDFYPFLKDNREKIEKILTFRIPYYVGPLARGNSRFAWMTRKSEETITPWNFEEVVDKGASAQSFIERMTNFDKNLPNEKVLPKHSLLYEYFTVYNELTKVKYVTEGMRKPAFLSGEQKKAIVDLLFKTNRKVTVKQLKEDYFKKIECFDSVEISGVEDRFNASLGTYHDLLKIIKDKDFLDNEENEDILEDIVLTLTLFEDREMIEERLKTYAHLFDDKVMKQLKRRRYTGWGRLSRKLINGIRDKQSGKTILDFLKSDGFANRNFMQLIHDDSLTFKEDIQKAQVSGQGDSLHEHIANLAGSPAIKKGILQTVKVVDELVKVMGRHKPENIVIEMARENQTTQKGQKNSRERMKRIEEGIKELGSQILKEHPVENTQLQNEKLYLYYLQNGRDMYVDQELDINRLSDYDVDHIVPQSFLKDDSIDNKVLTRSDKARGKSDNVPSEEVVKKMKNYWRQLLNAKLITQRKFDNLTKAERGGLSELDKAGFIKRQLVETRQITKHVAQILDSRMNTKYDENDKLIREVKVITLKSKLVSDFRKDFQFYKVREINNYHHAHDAYLNAVVGTALIKKYPKLESEFVYGDYKVYDVRKMIAKSEQEIGKATAKYFFYSNIMNFFKTEITLANGEIRKRPLIETNGETGEIVWDKGRDFATVRKVLSMPQVNIVKKTEVQTGGFSKESILPKRNSDKLIARKKDWDPKKYGGFDSPTVAYSVLVVAKVEKGKSKKLKSVKELLGITIMERSSFEKNPIDFLEAKGYKEVKKDLIIKLPKYSLFELENGRKRMLASAGELQKGNELALPSKYVNFLYLASHYEKLKGSPEDNEQKQLFVEQHKHYLDEIIEQISEFSKRVILADANLDKVLSAYNKHRDKPIREQAENIIHLFTLTNLGAPAAFKYFDTTIDRKRYTSTKEVLDATLIHQSITGLYETRIDLSQLGGDGGEAAAKGGGGGSGGTLGDQGSRGSDPLPEPRVTLTVEGIPTEFLVNTGAEHSVLTKPMGKMGSKRTVVAGATGSKVYPWTTKRLLKIGQKQVTHSFLVIPECPAPLLGRDLLTKLKAQIQFSTEGPQVTWEDRPAMCLVLNLEEEYRLHEKPVPPSIDPSWLQLFPMVWAEKAGMGLANQVPPVVVELKSDASPVAVRQYPMSKEAREGIRPHIQRFLDLGILVPCQSPWNTPLLPVKKPGTNDYRPVQDLREVNKRVQDIHPTVPNPYNLLSSLPPSHTWYSVLDLKDAFFCLKLHPNSQPLFAFEWRDPEKGNTGQLTWTRLPQGFKNSPTLFNEALHRDLASFRALNPQVVMLQYVDDLLVAAPTYRDCKEGTRRLLQELSKLGYRVSAKKAQLCREEVTYLGYLLKGGKRWLTPARKATVMKIPTPTTPRQVREFLGKAGFCRLFIPGFASLAAPLYPLTRPKVPFTWTEAHQEAFGRIKEALLSAPALALPDLTKPFALYVDEKEGVARGVLTQTLGPWRRPVAYLSKKLDPVASGWPTCLKAIAAVALLLKDADKLTLGQNVLVIAPHNLESIVRQPPDRWMTNARMTHYQSLLLNERVSFAPPAILNPATLLPVESDDTPIHICSEILAEETGTRPDLRDQPLPGVPAWYTDGSSFIMDGRRQAGAAIVDNKRTVWASNLPEGTSAQKAELIALTQALRLAEGKSINIYTDSRYAFATAHVHGAIYKQRGWLTSAGKDIKNKEEILALLEAIHLPKRVAIIHCPGHQRGTDPVATGNRKADEAAKQAAQSTRILTETTKNAGKRTADGSEFEKRTADGSEFESPKKKAKVE

SEQ ID NO: 6963 - protein, 2096 aa, synthetic construct
MPAAKRVKLDGGDKKYSIGLDIGTNSVGWAVITDEYKVPSKKFKVLGNTDRHSIKKNLIGALLFDSGETAEATRLKRTARRRYTRRKNRICYLQEIFSNEMAKVDDSFFHRLEESFLVEEDKKHERHPIFGNIVDEVAYHEKYPTIYHLRKKLVDSTDKADLRLIYLALAHMIKFRGHFLIEGDLNPDNSDVDKLFIQLVQTYNQLFEENPINASGVDAKAILSARLSKSRRLENLIAQLPGEKKNGLFGNLIALSLGLTPNFKSNFDLAEDAKLQLSKDTYDDDLDNLLAQIGDQYADLFLAAKNLSDAILLSDILRVNTEITKAPLSASMIKRYDEHHQDLTLLKALVRQQLPEKYKEIFFDQSKNGYAGYIDGGASQEEFYKFIKPILEKMDGTEELLVKLNREDLLRKQRTFDNGSIPHQIHLGELHAILRRQEDFYPFLKDNREKIEKILTFRIPYYVGPLARGNSRFAWMTRKSEETITPWNFEEVVDKGASAQSFIERMTNFDKNLPNEKVLPKHSLLYEYFTVYNELTKVKYVTEGMRKPAFLSGEQKKAIVDLLFKTNRKVTVKQLKEDYFKKIECFDSVEISGVEDRFNASLGTYHDLLKIIKDKDFLDNEENEDILEDIVLTLTLFEDREMIEERLKTYAHLFDDKVMKQLKRRRYTGWGRLSRKLINGIRDKQSGKTILDFLKSDGFANRNFMQLIHDDSLTFKEDIQKAQVSGQGDSLHEHIANLAGSPAIKKGILQTVKVVDELVKVMGRHKPENIVIEMARENQTTQKGQKNSRERMKRIEEGIKELGSQILKEHPVENTQLQNEKLYLYYLQNGRDMYVDQELDINRLSDYDVDHIVPQSFLKDDSIDNKVLTRSDKARGKSDNVPSEEVVKKMKNYWRQLLNAKLITQRKFDNLTKAERGGLSELDKAGFIKRQLVETRQITKHVAQILDSRMNTKYDENDKLIREVKVITLKSKLVSDFRKDFQFYKVREINNYHHAHDAYLNAVVGTALIKKYPKLESEFVYGDYKVYDVRKMIAKSEQEIGKATAKYFFYSNIMNFFKTEITLANGEIRKRPLIETNGETGEIVWDKGRDFATVRKVLSMPQVNIVKKTEVQTGGFSKESILPKRNSDKLIARKKDWDPKKYGGFDSPTVAYSVLVVAKVEKGKSKKLKSVKELLGITIMERSSFEKNPIDFLEAKGYKEVKKDLIIKLPKYSLFELENGRKRMLASAGELQKGNELALPSKYVNFLYLASHYEKLKGSPEDNEQKQLFVEQHKHYLDEIIEQISEFSKRVILADANLDKVLSAYNKHRDKPIREQAENIIHLFTLTNLGAPAAFKYFDTTIDRKRYTSTKEVLDATLIHQSITGLYETRIDLSQLGGDGGEAAAKGGGGGSGGTLNLEDEYRLYETSAEPEVSPGSTWLSDFPQAWAETGGMGLAVRQAPLIIPLKATSTPVSIKQYPMSQEAKLGIKPHIQRLLDQGILVPCQSPWNTPLLPVKKPGTNDYRPVQDLREVNKRVEDIHPTVPNPYNLLSGLPPSHRWYTVLDLKDAFFCLRLHPTSQPLFAFEWRDPGMGISGQLTWTRLPQGFKNSPTLFNEALHRDLADFRIQHPDLILLQYVDDILLAATSELDCQQGTRALLLTLGNLGYRASAKKAQLCQKQVKYLGYLLKEGQRWLTEARKETVMGQPTPKTPRQLREFLGKAGFCRLFIPGFAEMAAPLYPLTKPGTLFNWGPDQQKAYQEIKQALLTAPALGLPDLTKPFELFVDEKQGYAKGVLTQKLGPWRRPVAYLSKKLDPVAAGWPPCLRMVAAIAVLRKDAGKLTMGQPLVILAPHAVEALVKQPPDRWLSNARMTHYQAMLLDTDRVQFGPVVALNPATLLPLPEEGAPHDCLEILAETHGTRPDLTDQPIPDADHTWYTDGSSFLQEGQRKAGAAVTTETEVIWARALPAGTSAQRAELIALTQALKMAEGKRLNVYTDSRYAFATAHIHGEIYRRRGWLTSEGREIKNKSEILALLKALFLPKRLSIIHCLGHQKGDSAEARGNRLADQAAREAAIKTPPDTSTLLAGKRTADGSEFEKRTADGSEFESPKKKAKVE

SEQ ID NO: 6964 - protein, 2096 aa, synthetic construct
MPAAKRVKLDGGDKKYSIGLDIGTNSVGWAVITDEYKVPSKKFKVLGNTDRHSIKKNLIGALLFDSGETAEATRLKRTARRRYTRRKNRICYLQEIFSNEMAKVDDSFFHRLEESFLVEEDKKHERHPIFGNIVDEVAYHEKYPTIYHLRKKLVDSTDKADLRLIYLALAHMIKFRGHFLIEGDLNPDNSDVDKLFIQLVQTYNQLFEENPINASGVDAKAILSARLSKSRRLENLIAQLPGEKKNGLFGNLIALSLGLTPNFKSNFDLAEDAKLQLSKDTYDDDLDNLLAQIGDQYADLFLAAKNLSDAILLSDILRVNTEITKAPLSASMIKRYDEHHQDLTLLKALVRQQLPEKYKEIFFDQSKNGYAGYIDGGASQEEFYKFIKPILEKMDGTEELLVKLNREDLLRKQRTFDNGSIPHQIHLGELHAILRRQEDFYPFLKDNREKIEKILTFRIPYYVGPLARGNSRFAWMTRKSEETITPWNFEEVVDKGASAQSFIERMTNFDKNLPNEKVLPKHSLLYEYFTVYNELTKVKYVTEGMRKPAFLSGEQKKAIVDLLFKTNRKVTVKQLKEDYFKKIECFDSVEISGVEDRFNASLGTYHDLLKIIKDKDFLDNEENEDILEDIVLTLTLFEDREMIEERLKTYAHLFDDKVMKQLKRRRYTGWGRLSRKLINGIRDKQSGKTILDFLKSDGFANRNFMQLIHDDSLTFKEDIQKAQVSGQGDSLHEHIANLAGSPAIKKGILQTVKVVDELVKVMGRHKPENIVIEMARENQTTQKGQKNSRERMKRIEEGIKELGSQILKEHPVENTQLQNEKLYLYYLQNGRDMYVDQELDINRLSDYDVDHIVPQSFLKDDSIDNKVLTRSDKARGKSDNVPSEEVVKKMKNYWRQLLNAKLITQRKFDNLTKAERGGLSELDKAGFIKRQLVETRQITKHVAQILDSRMNTKYDENDKLIREVKVITLKSKLVSDFRKDFQFYKVREINNYHHAHDAYLNAVVGTALIKKYPKLESEFVYGDYKVYDVRKMIAKSEQEIGKATAKYFFYSNIMNFFKTEITLANGEIRKRPLIETNGETGEIVWDKGRDFATVRKVLSMPQVNIVKKTEVQTGGFSKESILPKRNSDKLIARKKDWDPKKYGGFDSPTVAYSVLVVAKVEKGKSKKLKSVKELLGITIMERSSFEKNPIDFLEAKGYKEVKKDLIIKLPKYSLFELENGRKRMLASAGELQKGNELALPSKYVNFLYLASHYEKLKGSPEDNEQKQLFVEQHKHYLDEIIEQISEFSKRVILADANLDKVLSAYNKHRDKPIREQAENIIHLFTLTNLGAPAAFKYFDTTIDRKRYTSTKEVLDATLIHQSITGLYETRIDLSQLGGDGGEAAAKGGGGGSGGTLGIEDEYRLHETSTEPDVSLGSTWLSDFPQAWAETGGMGLAVRQAPLIIPLKATSTPVSIQQYPMSHEARLGIKPHIQRLLDQGILVPCQSPWNTPLLPVKKPGTNDYRPVQDLREVNKRVEDIHPTVPNPYNLLSGLPPSHQWYTVLDLKDAFFCLRLHPTSQPLFAFEWRDPGMGISGQLTWTRLPQGFKNSPTLFDEALHRDLADFRIQHPDLILLQYVDDILLAATSELDCQQGTRALLQTLGDLGYRASAKKAQICQKQVKYLGYLLREGQRWLTEARKETVMGQPVPKTPRQLREFLGTAGFCRLWIPGFAEMAAPLYPLTKTGTLFSWGPDQQKAYQEIKQALLTAPALGLPDLTKPFELFVDEKQGYAKGVLTQKLGPWRRPVAYLSKKLDPVAAGWPPCLRMVAAIAVLTKDAGKLTMGQPLVILAPHAVEALVKQPPDRWLSNARMTHYQAMLLDTDRVQFGPVVALNPATLLPLPEEGAPHDCLEILAETHGTRPDLTDQPIPDADHTWYTDGSSFLQEGQRKAGAAVTTETEVIWAGALPAGTSAQRAELIALTQALKMAEGKRLNVYTDSRYAFATAHIHGEIYRRRGLLTSEGREIKNKSEILALLKALFLPKRLSIIHCLGHQKGDSAEARGNRLADQAAREAAIKTPPDTSTLLAGKRTADGSEFEKRTADGSEFESPKKKAKVE

SEQ ID NO: 6965 - protein, 2096 aa, synthetic construct
MPAAKRVKLDGGDKKYSIGLDIGTNSVGWAVITDEYKVPSKKFKVLGNTDRHSIKKNLIGALLFDSGETAEATRLKRTARRRYTRRKNRICYLQEIFSNEMAKVDDSFFHRLEESFLVEEDKKHERHPIFGNIVDEVAYHEKYPTIYHLRKKLVDSTDKADLRLIYLALAHMIKFRGHFLIEGDLNPDNSDVDKLFIQLVQTYNQLFEENPINASGVDAKAILSARLSKSRRLENLIAQLPGEKKNGLFGNLIALSLGLTPNFKSNFDLAEDAKLQLSKDTYDDDLDNLLAQIGDQYADLFLAAKNLSDAILLSDILRVNTEITKAPLSASMIKRYDEHHQDLTLLKALVRQQLPEKYKEIFFDQSKNGYAGYIDGGASQEEFYKFIKPILEKMDGTEELLVKLNREDLLRKQRTFDNGSIPHQIHLGELHAILRRQEDFYPFLKDNREKIEKILTFRIPYYVGPLARGNSRFAWMTRKSEETITPWNFEEVVDKGASAQSFIERMTNFDKNLPNEKVLPKHSLLYEYFTVYNELTKVKYVTEGMRKPAFLSGEQKKAIVDLLFKTNRKVTVKQLKEDYFKKIECFDSVEISGVEDRFNASLGTYHDLLKIIKDKDFLDNEENEDILEDIVLTLTLFEDREMIEERLKTYAHLFDDKVMKQLKRRRYTGWGRLSRKLINGIRDKQSGKTILDFLKSDGFANRNFMQLIHDDSLTFKEDIQKAQVSGQGDSLHEHIANLAGSPAIKKGILQTVKVVDELVKVMGRHKPENIVIEMARENQTTQKGQKNSRERMKRIEEGIKELGSQILKEHPVENTQLQNEKLYLYYLQNGRDMYVDQELDINRLSDYDVDHIVPQSFLKDDSIDNKVLTRSDKARGKSDNVPSEEVVKKMKNYWRQLLNAKLITQRKFDNLTKAERGGLSELDKAGFIKRQLVETRQITKHVAQILDSRMNTKYDENDKLIREVKVITLKSKLVSDFRKDFQFYKVREINNYHHAHDAYLNAVVGTALIKKYPKLESEFVYGDYKVYDVRKMIAKSEQEIGKATAKYFFYSNIMNFFKTEITLANGEIRKRPLIETNGETGEIVWDKGRDFATVRKVLSMPQVNIVKKTEVQTGGFSKESILPKRNSDKLIARKKDWDPKKYGGFDSPTVAYSVLVVAKVEKGKSKKLKSVKELLGITIMERSSFEKNPIDFLEAKGYKEVKKDLIIKLPKYSLFELENGRKRMLASAGELQKGNELALPSKYVNFLYLASHYEKLKGSPEDNEQKQLFVEQHKHYLDEIIEQISEFSKRVILADANLDKVLSAYNKHRDKPIREQAENIIHLFTLTNLGAPAAFKYFDTTIDRKRYTSTKEVLDATLIHQSITGLYETRIDLSQLGGDGGEAAAKGGGGGSGGTLNIEDEYRLHETSKGPDVPLGSTWLSDFPQAWAETGGMGLAVRQAPLIIPLKATSTPVSIKQYPMSQEARLGIKPHIQRLLDQGILVPCQSPWNTPLLPVKKPGTNDYRPVQDLREVNKRVEDIHPTVPNPYNLLSGLPPSHQWYTVLDLKDAFFCLRLHPTSQSLFAFEWRDPEMGISGQLTWTRLPQGFKNSPTLFDEALHRDLADFRIQHPDLILLQYVDDLLLAATSELDCQQGTRALLQTLGDLGYRASAKKAQICQKQVKYLGYLLKEGQRWLTEARKETVMGQPTPKTPRQLREFLGTAGFCRLWIPGFAEMAAPLYPLTKTGTLFEWGPDQQKAYQEIKQALLTAPALGLPDLTKPFELFVDEKQGYAKGVLTQKLGPWRRPVAYLSKKLDPVAAGWPPCLRMVAAIAVLTKDAGKLTMGQPLVILAPHAVEALVKQPPDRWLSNARMTHYQALLLDTDRVQFGPIVALNPATLLPLPEEGLQHDCLDILAEAHGTRPDLTDQPLPDADHTWYTDGSSFLQEGQRKAGAAVTTETEVVWAKALPAGTSAQRAELIALTQALKMAEGKKLNVYTDSRYAFATAHIHGEIYRRRGLLTSEGKEIKNKDEILALLKALFLPKRLSIIHCPGHQKGNRAEARGNRMADQAAREVATRETPETSTLLAGKRTADGSEFEKRTADGSEFESPKKKAKVE

SEQ ID NO: 6966 - protein, 2087 aa, synthetic construct
MPAAKRVKLDGGDKKYSIGLDIGTNSVGWAVITDEYKVPSKKFKVLGNTDRHSIKKNLIGALLFDSGETAEATRLKRTARRRYTRRKNRICYLQEIFSNEMAKVDDSFFHRLEESFLVEEDKKHERHPIFGNIVDEVAYHEKYPTIYHLRKKLVDSTDKADLRLIYLALAHMIKFRGHFLIEGDLNPDNSDVDKLFIQLVQTYNQLFEENPINASGVDAKAILSARLSKSRRLENLIAQLPGEKKNGLFGNLIALSLGLTPNFKSNFDLAEDAKLQLSKDTYDDDLDNLLAQIGDQYADLFLAAKNLSDAILLSDILRVNTEITKAPLSASMIKRYDEHHQDLTLLKALVRQQLPEKYKEIFFDQSKNGYAGYIDGGASQEEFYKFIKPILEKMDGTEELLVKLNREDLLRKQRTFDNGSIPHQIHLGELHAILRRQEDFYPFLKDNREKIEKILTFRIPYYVGPLARGNSRFAWMTRKSEETITPWNFEEVVDKGASAQSFIERMTNFDKNLPNEKVLPKHSLLYEYFTVYNELTKVKYVTEGMRKPAFLSGEQKKAIVDLLFKTNRKVTVKQLKEDYFKKIECFDSVEISGVEDRFNASLGTYHDLLKIIKDKDFLDNEENEDILEDIVLTLTLFEDREMIEERLKTYAHLFDDKVMKQLKRRRYTGWGRLSRKLINGIRDKQSGKTILDFLKSDGFANRNFMQLIHDDSLTFKEDIQKAQVSGQGDSLHEHIANLAGSPAIKKGILQTVKVVDELVKVMGRHKPENIVIEMARENQTTQKGQKNSRERMKRIEEGIKELGSQILKEHPVENTQLQNEKLYLYYLQNGRDMYVDQELDINRLSDYDVDHIVPQSFLKDDSIDNKVLTRSDKARGKSDNVPSEEVVKKMKNYWRQLLNAKLITQRKFDNLTKAERGGLSELDKAGFIKRQLVETRQITKHVAQILDSRMNTKYDENDKLIREVKVITLKSKLVSDFRKDFQFYKVREINNYHHAHDAYLNAVVGTALIKKYPKLESEFVYGDYKVYDVRKMIAKSEQEIGKATAKYFFYSNIMNFFKTEITLANGEIRKRPLIETNGETGEIVWDKGRDFATVRKVLSMPQVNIVKKTEVQTGGFSKESILPKRNSDKLIARKKDWDPKKYGGFDSPTVAYSVLVVAKVEKGKSKKLKSVKELLGITIMERSSFEKNPIDFLEAKGYKEVKKDLIIKLPKYSLFELENGRKRMLASAGELQKGNELALPSKYVNFLYLASHYEKLKGSPEDNEQKQLFVEQHKHYLDEIIEQISEFSKRVILADANLDKVLSAYNKHRDKPIREQAENIIHLFTLTNLGAPAAFKYFDTTIDRKRYTSTKEVLDATLIHQSITGLYETRIDLSQLGGDGGEAAAKGGGGGSGGIPWLMKKPLQLTTLVPLQEYEERLLKQTMLTGSYKEKLQSLFLKYDALWQHWENQVGHRRIKPHHIATGTVNPRPQKQYPINPKAKASIQTVINDLLKQGVLIQQNSIMNTPVYPVPKPDGKWRMVLDYREVNKTIPLIAAQNQHSAGILSSIFRGKYKTTLDLSNGFWAHSITPESYWLTAFTWLGQQYCWTRLPQGFLNSPALFNADVVDLLKEVPNVQVYVDDIYISHDDPREHLEQLEKVFSLLLNAGYVVSLKKSEIAQHEVEFLGFNITKEGRGLTETFKQKLLNITPPRDLKQLQSILGLLNFARNFIPNFSELVKPLYNIIATAPGKYITWTTDNSQQLQNIISMLNSAENLEERNPEVRLIMKVNTSPSAGYIRFYNEFAKRPIMYLNYVYTKAEVKFTNTEKLLTTIHKGLIKALDLGMGQEILVYSPIVSMTKIQKTPLPERKALPIRWITWMSYLEDPRIQFHYDKTLPELQQVPTVTDDIIAKIKHPSEFSMVFYTDGSAIKHPNVNKSHNAGMGIAQVQFKPEFTVINTWSIPLGDHTAQLAEVAAVEFACKKALKIDGPVLIVTDSFYVAESVNKELPYWQSNGFFNNKKKPLKHVSKWKSIADCIQLKPDIIIIHEKGHQPTASTFHTEGNNLADKLATQGSYVVNAGKRTADGSEFEKRTADGSEFESPKKKAKVE

SEQ ID NO: 6967 - protein, 2087 aa, synthetic construct
MPAAKRVKLDGGDKKYSIGLDIGTNSVGWAVITDEYKVPSKKFKVLGNTDRHSIKKNLIGALLFDSGETAEATRLKRTARRRYTRRKNRICYLQEIFSNEMAKVDDSFFHRLEESFLVEEDKKHERHPIFGNIVDEVAYHEKYPTIYHLRKKLVDSTDKADLRLIYLALAHMIKFRGHFLIEGDLNPDNSDVDKLFIQLVQTYNQLFEENPINASGVDAKAILSARLSKSRRLENLIAQLPGEKKNGLFGNLIALSLGLTPNFKSNFDLAEDAKLQLSKDTYDDDLDNLLAQIGDQYADLFLAAKNLSDAILLSDILRVNTEITKAPLSASMIKRYDEHHQDLTLLKALVRQQLPEKYKEIFFDQSKNGYAGYIDGGASQEEFYKFIKPILEKMDGTEELLVKLNREDLLRKQRTFDNGSIPHQIHLGELHAILRRQEDFYPFLKDNREKIEKILTFRIPYYVGPLARGNSRFAWMTRKSEETITPWNFEEVVDKGASAQSFIERMTNFDKNLPNEKVLPKHSLLYEYFTVYNELTKVKYVTEGMRKPAFLSGEQKKAIVDLLFKTNRKVTVKQLKEDYFKKIECFDSVEISGVEDRFNASLGTYHDLLKIIKDKDFLDNEENEDILEDIVLTLTLFEDREMIEERLKTYAHLFDDKVMKQLKRRRYTGWGRLSRKLINGIRDKQSGKTILDFLKSDGFANRNFMQLIHDDSLTFKEDIQKAQVSGQGDSLHEHIANLAGSPAIKKGILQTVKVVDELVKVMGRHKPENIVIEMARENQTTQKGQKNSRERMKRIEEGIKELGSQILKEHPVENTQLQNEKLYLYYLQNGRDMYVDQELDINRLSDYDVDHIVPQSFLKDDSIDNKVLTRSDKARGKSDNVPSEEVVKKMKNYWRQLLNAKLITQRKFDNLTKAERGGLSELDKAGFIKRQLVETRQITKHVAQILDSRMNTKYDENDKLIREVKVITLKSKLVSDFRKDFQFYKVREINNYHHAHDAYLNAVVGTALIKKYPKLESEFVYGDYKVYDVRKMIAKSEQEIGKATAKYFFYSNIMNFFKTEITLANGEIRKRPLIETNGETGEIVWDKGRDFATVRKVLSMPQVNIVKKTEVQTGGFSKESILPKRNSDKLIARKKDWDPKKYGGFDSPTVAYSVLVVAKVEKGKSKKLKSVKELLGITIMERSSFEKNPIDFLEAKGYKEVKKDLIIKLPKYSLFELENGRKRMLASAGELQKGNELALPSKYVNFLYLASHYEKLKGSPEDNEQKQLFVEQHKHYLDEIIEQISEFSKRVILADANLDKVLSAYNKHRDKPIREQAENIIHLFTLTNLGAPAAFKYFDTTIDRKRYTSTKEVLDATLIHQSITGLYETRIDLSQLGGDGGEAAAKGGGGGSGGIPWLMKKPLQLTTLVPLQEYEERLLKQTMLTGSYKEKLQSLFLKYDALWQHWENQVGHRRIKPHHIATGTVNPRPQKQYPINPKAKASIQTVINDLLKQGVLIQQNSIMNTPVYPVPKPDGKWRMVLDYREVNKTIPLIAAQNQHSAGILSSIFRGKYKTTLDLSNGFWAHSITPESYWLTAFTWLGQQYCWTRLPQGFLNSPALFNADVVDLLKEVPNVQVYVDDIYISHDDPREHLEQLEKVFSLLLNAGYVVSLKKSEIAQHEVEFLGFNITKEGRGLTETFKQKLLNITPPRDLKQLQSILGKLNFARNFIPNFSELVKPLYNIIATAPGKYITWTTDNSQQLQNIISMLNSAENLEERNPEVRLIMKVNTSPSAGYIRFYNEFAKRPIMYLNYVYTKAEVKFTNTEKLLTTIHKGLIKALDLGMGQEILVYSPIVSMTKIQKTPLPERKALPIRWITWMSYLEDPRIQFHYDKTLPELQQVPTVTDDIIAKIKHPSEFSMVFYTDGSAIKHPNVNKSHNAGMGIAQVQFKPEFTVINTWSIPLGDHTAQLAEVAAVEFACKKALKIDGPVLIVTDSFYVAESVNKELPYWQSNGFFNNKKKPLKHVSKWKSIADCIQLKPDIIIIHEKGHQPTASTFHTEGNNLADKLATQGSYVVNAGKRTADGSEFEKRTADGSEFESPKKKAKVE

SEQ ID NO: 6968 - protein, 2094 aa, synthetic construct
MPAAKRVKLDGGDKKYSIGLDIGTNSVGWAVITDEYKVPSKKFKVLGNTDRHSIKKNLIGALLFDSGETAEATRLKRTARRRYTRRKNRICYLQEIFSNEMAKVDDSFFHRLEESFLVEEDKKHERHPIFGNIVDEVAYHEKYPTIYHLRKKLVDSTDKADLRLIYLALAHMIKFRGHFLIEGDLNPDNSDVDKLFIQLVQTYNQLFEENPINASGVDAKAILSARLSKSRRLENLIAQLPGEKKNGLFGNLIALSLGLTPNFKSNFDLAEDAKLQLSKDTYDDDLDNLLAQIGDQYADLFLAAKNLSDAILLSDILRVNTEITKAPLSASMIKRYDEHHQDLTLLKALVRQQLPEKYKEIFFDQSKNGYAGYIDGGASQEEFYKFIKPILEKMDGTEELLVKLNREDLLRKQRTFDNGSIPHQIHLGELHAILRRQEDFYPFLKDNREKIEKILTFRIPYYVGPLARGNSRFAWMTRKSEETITPWNFEEVVDKGASAQSFIERMTNFDKNLPNEKVLPKHSLLYEYFTVYNELTKVKYVTEGMRKPAFLSGEQKKAIVDLLFKTNRKVTVKQLKEDYFKKIECFDSVEISGVEDRFNASLGTYHDLLKIIKDKDFLDNEENEDILEDIVLTLTLFEDREMIEERLKTYAHLFDDKVMKQLKRRRYTGWGRLSRKLINGIRDKQSGKTILDFLKSDGFANRNFMQLIHDDSLTFKEDIQKAQVSGQGDSLHEHIANLAGSPAIKKGILQTVKVVDELVKVMGRHKPENIVIEMARENQTTQKGQKNSRERMKRIEEGIKELGSQILKEHPVENTQLQNEKLYLYYLQNGRDMYVDQELDINRLSDYDVDHIVPQSFLKDDSIDNKVLTRSDKARGKSDNVPSEEVVKKMKNYWRQLLNAKLITQRKFDNLTKAERGGLSELDKAGFIKRQLVETRQITKHVAQILDSRMNTKYDENDKLIREVKVITLKSKLVSDFRKDFQFYKVREINNYHHAHDAYLNAVVGTALIKKYPKLESEFVYGDYKVYDVRKMIAKSEQEIGKATAKYFFYSNIMNFFKTEITLANGEIRKRPLIETNGETGEIVWDKGRDFATVRKVLSMPQVNIVKKTEVQTGGFSKESILPKRNSDKLIARKKDWDPKKYGGFDSPTVAYSVLVVAKVEKGKSKKLKSVKELLGITIMERSSFEKNPIDFLEAKGYKEVKKDLIIKLPKYSLFELENGRKRMLASAGELQKGNELALPSKYVNFLYLASHYEKLKGSPEDNEQKQLFVEQHKHYLDEIIEQISEFSKRVILADANLDKVLSAYNKHRDKPIREQAENIIHLFTLTNLGAPAAFKYFDTTIDRKRYTSTKEVLDATLIHQSITGLYETRIDLSQLGGDGGEAAAKGGGGGSGGVLNLEEEYRLHEKPVPSSIDPSWLQLFPTVWAERAGMGLANQVPPVVVELRSGASPVAVRQYPMSKEAREGIRPHIQRFLDLGVLVPCQSPWNTPLLPVKKPGTNDYRPVQDLREINKRVQDIHPTVPNPYNLLSSLPPSHTWYSVLDLKDAFFCLKLHPNSQPLFAFEWRDPEKGNTGQLTWTRLPQGFKNSPTLFNEALHRDLAPFRALNPQVVLLQYVDDLLVAAPTYRDCKEGTQKLLQELSKLGYRVSAKKAQLCQKEVTYLGYLLKEGKRWLTPARKATVMKIPPPTTPRQVREFLGKAGFCRLFIPGFASLAAPLYPLTKPSIPFIWTEEHQKAFDRIKEALLSAPALALPDLTKPFTLYVDERAGVARGVLTQTLGPWRRPVAYLSKKLDPVASGWPTCLKAVAAVALLLKDADKLTLGQNVTVIASHSLESIVRQPPDRWMTNARMTHYQSLLLNERVSFAPPAVLNPATLLPVESEATPVHRCSEILAEETGTRRDLKDQPLPGVPAWYTDGSSFIAEGKRRAGAAIVDGKRTVWASSLPEGTSAQKAELVALTQALRLAEGKDINIYTDSRYAFATAHIHGAIYKQRGWLTSAGKDIKNKEEILALLEAIHLPKRVAIIHCPGHQKGNDPVATGNRRADEAAKQAALSTRVLAETTKPAGKRTADGSEFEKRTADGSEFESPKKKAKVE

SEQ ID NO: 6969 - protein, 2096 aa, synthetic construct
MPAAKRVKLDGGDKKYSIGLDIGTNSVGWAVITDEYKVPSKKFKVLGNTDRHSIKKNLIGALLFDSGETAEATRLKRTARRRYTRRKNRICYLQEIFSNEMAKVDDSFFHRLEESFLVEEDKKHERHPIFGNIVDEVAYHEKYPTIYHLRKKLVDSTDKADLRLIYLALAHMIKFRGHFLIEGDLNPDNSDVDKLFIQLVQTYNQLFEENPINASGVDAKAILSARLSKSRRLENLIAQLPGEKKNGLFGNLIALSLGLTPNFKSNFDLAEDAKLQLSKDTYDDDLDNLLAQIGDQYADLFLAAKNLSDAILLSDILRVNTEITKAPLSASMIKRYDEHHQDLTLLKALVRQQLPEKYKEIFFDQSKNGYAGYIDGGASQEEFYKFIKPILEKMDGTEELLVKLNREDLLRKQRTFDNGSIPHQIHLGELHAILRRQEDFYPFLKDNREKIEKILTFRIPYYVGPLARGNSRFAWMTRKSEETITPWNFEEVVDKGASAQSFIERMTNFDKNLPNEKVLPKHSLLYEYFTVYNELTKVKYVTEGMRKPAFLSGEQKKAIVDLLFKTNRKVTVKQLKEDYFKKIECFDSVEISGVEDRFNASLGTYHDLLKIIKDKDFLDNEENEDILEDIVLTLTLFEDREMIEERLKTYAHLFDDKVMKQLKRRRYTGWGRLSRKLINGIRDKQSGKTILDFLKSDGFANRNFMQLIHDDSLTFKEDIQKAQVSGQGDSLHEHIANLAGSPAIKKGILQTVKVVDELVKVMGRHKPENIVIEMARENQTTQKGQKNSRERMKRIEEGIKELGSQILKEHPVENTQLQNEKLYLYYLQNGRDMYVDQELDINRLSDYDVDHIVPQSFLKDDSIDNKVLTRSDKARGKSDNVPSEEVVKKMKNYWRQLLNAKLITQRKFDNLTKAERGGLSELDKAGFIKRQLVETRQITKHVAQILDSRMNTKYDENDKLIREVKVITLKSKLVSDFRKDFQFYKVREINNYHHAHDAYLNAVVGTALIKKYPKLESEFVYGDYKVYDVRKMIAKSEQEIGKATAKYFFYSNIMNFFKTEITLANGEIRKRPLIETNGETGEIVWDKGRDFATVRKVLSMPQVNIVKKTEVQTGGFSKESILPKRNSDKLIARKKDWDPKKYGGFDSPTVAYSVLVVAKVEKGKSKKLKSVKELLGITIMERSSFEKNPIDFLEAKGYKEVKKDLIIKLPKYSLFELENGRKRMLASAGELQKGNELALPSKYVNFLYLASHYEKLKGSPEDNEQKQLFVEQHKHYLDEIIEQISEFSKRVILADANLDKVLSAYNKHRDKPIREQAENIIHLFTLTNLGAPAAFKYFDTTIDRKRYTSTKEVLDATLIHQSITGLYETRIDLSQLGGDGGEAAAKGGGGGSGGTLNIEDEYRLHETSKEPDVPLGSTWLSDFPQAWAETGGMGLAVRQAPLIIPLKATSTPVSIKQYPMSQEARLGIKPHIQRLLDQGILVPCQSPWNTPLLPVKKPGTNDYRPVQDLREVNKRVEDIHPTVPNPYNLLSGLPPSHQWYTVLDLKDAFFCLRLHPTSQPLFAFEWRDPEMGISGQLTWTRLPQGFKNSPTLFNEALHRDLADFRIQHPDLILLQYVDDLLLAATSEQDCQRGTRALLQTLGNLGYRASAKKAQICQKQVKYLGYLLKEGQRWLTEARKETVMGQPTPKTPRQLREFLGTAGFCRLWIPGFAEMAAPLYPLTKPGTLFNWGPDQQKAYQEIKQALLTAPALGLPDLTKPFELFVDEKQGYAKGVLTQKLGPWRRPVAYLSKKLDPVAAGWPPCLRMVAAIAVLTKDAGKLTMGQPLVILAPHAVEALVKQPPDRWLSNARMTHYQAMLLDTDRVQFGPVVALNPATLLPLPEKEAPHDCLEILAETHGTRPDLTDQPIPDADYTWYTDGSSFLQEGQRRAGAAVTTETEVIWARALPAGTSAQRAELIALTQALKMAEGKKLNVYTDSRYAFATAHVHGEIYRRRGWLTSEGREIKNKNEILALLKALFLPKRLSIIHCPGHQKGNSAEARGNRMADQAAREAAMKAVLETSTLLAGKRTADGSEFEKRTADGSEFESPKKKAKVE

SEQ ID NO: 6970 - protein, 2096 aa, synthetic construct
MPAAKRVKLDGGDKKYSIGLDIGTNSVGWAVITDEYKVPSKKFKVLGNTDRHSIKKNLIGALLFDSGETAEATRLKRTARRRYTRRKNRICYLQEIFSNEMAKVDDSFFHRLEESFLVEEDKKHERHPIFGNIVDEVAYHEKYPTIYHLRKKLVDSTDKADLRLIYLALAHMIKFRGHFLIEGDLNPDNSDVDKLFIQLVQTYNQLFEENPINASGVDAKAILSARLSKSRRLENLIAQLPGEKKNGLFGNLIALSLGLTPNFKSNFDLAEDAKLQLSKDTYDDDLDNLLAQIGDQYADLFLAAKNLSDAILLSDILRVNTEITKAPLSASMIKRYDEHHQDLTLLKALVRQQLPEKYKEIFFDQSKNGYAGYIDGGASQEEFYKFIKPILEKMDGTEELLVKLNREDLLRKQRTFDNGSIPHQIHLGELHAILRRQEDFYPFLKDNREKIEKILTFRIPYYVGPLARGNSRFAWMTRKSEETITPWNFEEVVDKGASAQSFIERMTNFDKNLPNEKVLPKHSLLYEYFTVYNELTKVKYVTEGMRKPAFLSGEQKKAIVDLLFKTNRKVTVKQLKEDYFKKIECFDSVEISGVEDRFNASLGTYHDLLKIIKDKDFLDNEENEDILEDIVLTLTLFEDREMIEERLKTYAHLFDDKVMKQLKRRRYTGWGRLSRKLINGIRDKQSGKTILDFLKSDGFANRNFMQLIHDDSLTFKEDIQKAQVSGQGDSLHEHIANLAGSPAIKKGILQTVKVVDELVKVMGRHKPENIVIEMARENQTTQKGQKNSRERMKRIEEGIKELGSQILKEHPVENTQLQNEKLYLYYLQNGRDMYVDQELDINRLSDYDVDHIVPQSFLKDDSIDNKVLTRSDKARGKSDNVPSEEVVKKMKNYWRQLLNAKLITQRKFDNLTKAERGGLSELDKAGFIKRQLVETRQITKHVAQILDSRMNTKYDENDKLIREVKVITLKSKLVSDFRKDFQFYKVREINNYHHAHDAYLNAVVGTALIKKYPKLESEFVYGDYKVYDVRKMIAKSEQEIGKATAKYFFYSNIMNFFKTEITLANGEIRKRPLIETNGETGEIVWDKGRDFATVRKVLSMPQVNIVKKTEVQTGGFSKESILPKRNSDKLIARKKDWDPKKYGGFDSPTVAYSVLVVAKVEKGKSKKLKSVKELLGITIMERSSFEKNPIDFLEAKGYKEVKKDLIIKLPKYSLFELENGRKRMLASAGELQKGNELALPSKYVNFLYLASHYEKLKGSPEDNEQKQLFVEQHKHYLDEIIEQISEFSKRVILADANLDKVLSAYNKHRDKPIREQAENIIHLFTLTNLGAPAAFKYFDTTIDRKRYTSTKEVLDATLIHQSITGLYETRIDLSQLGGDGGGGSGGGPAPGGTAPLEEEYRLFLEAPIQNVTLLEQWKREIPKVWAEINPPGLASTQAPIHVQLLSTALPVRVRQYPITLEAKRSLRETIRKFRAAGILRPVHSPWNTPLLPVRKSGTSEYRMVQDLREVNKRVETIHPTVPNPYTLLSLLPPDRIWYSVLDLKDAFFCIPLAPESQLIFAFEWADAEEGESGQLTWTRLPQGFKNSPTLFDEALNRDLQGFRLDHPSVSLLQYVDDLLIAADTQAACLSATRDLLMTLAELGYRVSGKKAQLCQEEVTYLGFKIHKGSRSLSNSRTQAILQIPVPKTKRQVREFLGTIGYCRLWIPGFAELAQPLYAATRGGNDPLVWGEKEEEAFQSLKLALTQPPALALPSLDKPFQLFVEETSGAAKGVLTQALGPWKRPVAYLSKRLDPVAAGWPRCLRAIAAAALLTREASKLTFGQDIEITSSHNLESLLRSPPDKWLTNARITQYQVLLLDPPRVRFKQTAALNPATLLPETDDTLPIHHCLDTLDSLTSTRPDLTDQPLAQAEATLFTDGSSYIRDGKRYAGAAVVTLDSVIWAEPLPIGTSAQKAELIALTKALEWSKDKSVNIYTDSRYAFATLHVHGMIYRERGLLTAGGKAIKNAPEILALLTAVWLPKRVAVMHCKGHQKDDAPTSTGNRRADEVAREVAIRPLSTQATISAGKRTADGSEFEKRTADGSEFESPKKKAKVE

SEQ ID NO: 6971 - protein, 2096 aa, synthetic construct
MPAAKRVKLDGGDKKYSIGLDIGTNSVGWAVITDEYKVPSKKFKVLGNTDRHSIKKNLIGALLFDSGETAEATRLKRTARRRYTRRKNRICYLQEIFSNEMAKVDDSFFHRLEESFLVEEDKKHERHPIFGNIVDEVAYHEKYPTIYHLRKKLVDSTDKADLRLIYLALAHMIKFRGHFLIEGDLNPDNSDVDKLFIQLVQTYNQLFEENPINASGVDAKAILSARLSKSRRLENLIAQLPGEKKNGLFGNLIALSLGLTPNFKSNFDLAEDAKLQLSKDTYDDDLDNLLAQIGDQYADLFLAAKNLSDAILLSDILRVNTEITKAPLSASMIKRYDEHHQDLTLLKALVRQQLPEKYKEIFFDQSKNGYAGYIDGGASQEEFYKFIKPILEKMDGTEELLVKLNREDLLRKQRTFDNGSIPHQIHLGELHAILRRQEDFYPFLKDNREKIEKILTFRIPYYVGPLARGNSRFAWMTRKSEETITPWNFEEVVDKGASAQSFIERMTNFDKNLPNEKVLPKHSLLYEYFTVYNELTKVKYVTEGMRKPAFLSGEQKKAIVDLLFKTNRKVTVKQLKEDYFKKIECFDSVEISGVEDRFNASLGTYHDLLKIIKDKDFLDNEENEDILEDIVLTLTLFEDREMIEERLKTYAHLFDDKVMKQLKRRRYTGWGRLSRKLINGIRDKQSGKTILDFLKSDGFANRNFMQLIHDDSLTFKEDIQKAQVSGQGDSLHEHIANLAGSPAIKKGILQTVKVVDELVKVMGRHKPENIVIEMARENQTTQKGQKNSRERMKRIEEGIKELGSQILKEHPVENTQLQNEKLYLYYLQNGRDMYVDQELDINRLSDYDVDHIVPQSFLKDDSIDNKVLTRSDKARGKSDNVPSEEVVKKMKNYWRQLLNAKLITQRKFDNLTKAERGGLSELDKAGFIKRQLVETRQITKHVAQILDSRMNTKYDENDKLIREVKVITLKSKLVSDFRKDFQFYKVREINNYHHAHDAYLNAVVGTALIKKYPKLESEFVYGDYKVYDVRKMIAKSEQEIGKATAKYFFYSNIMNFFKTEITLANGEIRKRPLIETNGETGEIVWDKGRDFATVRKVLSMPQVNIVKKTEVQTGGFSKESILPKRNSDKLIARKKDWDPKKYGGFDSPTVAYSVLVVAKVEKGKSKKLKSVKELLGITIMERSSFEKNPIDFLEAKGYKEVKKDLIIKLPKYSLFELENGRKRMLASAGELQKGNELALPSKYVNFLYLASHYEKLKGSPEDNEQKQLFVEQHKHYLDEIIEQISEFSKRVILADANLDKVLSAYNKHRDKPIREQAENIIHLFTLTNLGAPAAFKYFDTTIDRKRYTSTKEVLDATLIHQSITGLYETRIDLSQLGGDGGGGSGGGPAPGGTAPLEEEYRLFLEAPIQNVTLLEQWKREIPKVWAEINPPGLASTQAPIHVQLLSTALPVRVRQYPITLEAKRSLRETIRKFRAAGILRPVHSPWNTPLLPVRKSGTSEYRMVQDLREVNKRVETIHPTVPNPYTLLSLLPPDRIWYSVLDLKDAFFCIPLAPESQLIFAFEWADAEEGESGQLTWTRLPQGFKNSPTLFNEALNRDLQGFRLDHPSVSLLQYVDDLLIAADTQAACLSATRDLLMTLAELGYRVSGKKAQLCQEEVTYLGFKIHKGSRSLSNSRTQAILQIPVPKTKRQVREFLGTIGYCRLWIPGFAELAQPLYAATRPGNDPLVWGEKEEEAFQSLKLALTQPPALALPSLDKPFQLFVEETSGAAKGVLTQALGPWKRPVAYLSKRLDPVAAGWPRCLRAIAAAALLTREASKLTFGQDIEITSSHNLESLLRSPPDKWLTNARITQYQVLLLDPPRVRFKQTAALNPATLLPETDDTLPIHHCLDTLDSLTSTRPDLTDQPLAQAEATLFTDGSSYIRDGKRYAGAAVVTLDSVIWAEPLPIGTSAQKAELIALTKALEWSKDKSVNIYTDSRYAFATLHVHGMIYRERGWLTAGGKAIKNAPEILALLTAVWLPKRVAVMHCKGHQKDDAPTSTGNRRADEVAREVAIRPLSTQATISAGKRTADGSEFEKRTADGSEFESPKKKAKVE

SEQ ID NO: 6972 - protein, 2096 aa, synthetic construct
MPAAKRVKLDGGDKKYSIGLDIGTNSVGWAVITDEYKVPSKKFKVLGNTDRHSIKKNLIGALLFDSGETAEATRLKRTARRRYTRRKNRICYLQEIFSNEMAKVDDSFFHRLEESFLVEEDKKHERHPIFGNIVDEVAYHEKYPTIYHLRKKLVDSTDKADLRLIYLALAHMIKFRGHFLIEGDLNPDNSDVDKLFIQLVQTYNQLFEENPINASGVDAKAILSARLSKSRRLENLIAQLPGEKKNGLFGNLIALSLGLTPNFKSNFDLAEDAKLQLSKDTYDDDLDNLLAQIGDQYADLFLAAKNLSDAILLSDILRVNTEITKAPLSASMIKRYDEHHQDLTLLKALVRQQLPEKYKEIFFDQSKNGYAGYIDGGASQEEFYKFIKPILEKMDGTEELLVKLNREDLLRKQRTFDNGSIPHQIHLGELHAILRRQEDFYPFLKDNREKIEKILTFRIPYYVGPLARGNSRFAWMTRKSEETITPWNFEEVVDKGASAQSFIERMTNFDKNLPNEKVLPKHSLLYEYFTVYNELTKVKYVTEGMRKPAFLSGEQKKAIVDLLFKTNRKVTVKQLKEDYFKKIECFDSVEISGVEDRFNASLGTYHDLLKIIKDKDFLDNEENEDILEDIVLTLTLFEDREMIEERLKTYAHLFDDKVMKQLKRRRYTGWGRLSRKLINGIRDKQSGKTILDFLKSDGFANRNFMQLIHDDSLTFKEDIQKAQVSGQGDSLHEHIANLAGSPAIKKGILQTVKVVDELVKVMGRHKPENIVIEMARENQTTQKGQKNSRERMKRIEEGIKELGSQILKEHPVENTQLQNEKLYLYYLQNGRDMYVDQELDINRLSDYDVDHIVPQSFLKDDSIDNKVLTRSDKARGKSDNVPSEEVVKKMKNYWRQLLNAKLITQRKFDNLTKAERGGLSELDKAGFIKRQLVETRQITKHVAQILDSRMNTKYDENDKLIREVKVITLKSKLVSDFRKDFQFYKVREINNYHHAHDAYLNAVVGTALIKKYPKLESEFVYGDYKVYDVRKMIAKSEQEIGKATAKYFFYSNIMNFFKTEITLANGEIRKRPLIETNGETGEIVWDKGRDFATVRKVLSMPQVNIVKKTEVQTGGFSKESILPKRNSDKLIARKKDWDPKKYGGFDSPTVAYSVLVVAKVEKGKSKKLKSVKELLGITIMERSSFEKNPIDFLEAKGYKEVKKDLIIKLPKYSLFELENGRKRMLASAGELQKGNELALPSKYVNFLYLASHYEKLKGSPEDNEQKQLFVEQHKHYLDEIIEQISEFSKRVILADANLDKVLSAYNKHRDKPIREQAENIIHLFTLTNLGAPAAFKYFDTTIDRKRYTSTKEVLDATLIHQSITGLYETRIDLSQLGGDGGGGSGGGPAPGGTAPLEEEYRLFLEAPIQNVTLLEQWKREIPKVWAEINPPGLASTQAPIHVQLLSTALPVRVRQYPITLEAKRSLRETIRKFRAAGILRPVHSPWNTPLLPVRKSGTSEYRMVQDLREVNKRVETIHPTVPNPYTLLSLLPPDRIWYSVLDLKDAFFCIPLAPESQLIFAFEWADAEEGESGQLTWTRLPQGFKNSPTLFNEALNRDLQGFRLDHPSVSLLQYVDDLLIAADTQAACLSATRDLLMTLAELGYRVSGKKAQLCQEEVTYLGFKIHKGSRSLSNSRTQAILQIPVPKTKRQVREFLGKIGYCRLFIPGFAELAQPLYAATRPGNDPLVWGEKEEEAFQSLKLALTQPPALALPSLDKPFQLFVEETSGAAKGVLTQALGPWKRPVAYLSKRLDPVAAGWPRCLRAIAAAALLTREASKLTFGQDIEITSSHNLESLLRSPPDKWLTNARITQYQVLLLDPPRVRFKQTAALNPATLLPETDDTLPIHHCLDTLDSLTSTRPDLTDQPLAQAEATLFTDGSSYIRDGKRYAGAAVVTLDSVIWAEPLPIGTSAQKAELIALTKALEWSKDKSVNIYTDSRYAFATLHVHGMIYRERGWLTAGGKAIKNAPEILALLTAVWLPKRVAVMHCKGHQKDDAPTSTGNRRADEVAREVAIRPLSTQATISAGKRTADGSEFEKRTADGSEFESPKKKAKVE

SEQ ID NO: 6973 - protein, 2100 aa, synthetic construct
MPAAKRVKLDGGDKKYSIGLDIGTNSVGWAVITDEYKVPSKKFKVLGNTDRHSIKKNLIGALLFDSGETAEATRLKRTARRRYTRRKNRICYLQEIFSNEMAKVDDSFFHRLEESFLVEEDKKHERHPIFGNIVDEVAYHEKYPTIYHLRKKLVDSTDKADLRLIYLALAHMIKFRGHFLIEGDLNPDNSDVDKLFIQLVQTYNQLFEENPINASGVDAKAILSARLSKSRRLENLIAQLPGEKKNGLFGNLIALSLGLTPNFKSNFDLAEDAKLQLSKDTYDDDLDNLLAQIGDQYADLFLAAKNLSDAILLSDILRVNTEITKAPLSASMIKRYDEHHQDLTLLKALVRQQLPEKYKEIFFDQSKNGYAGYIDGGASQEEFYKFIKPILEKMDGTEELLVKLNREDLLRKQRTFDNGSIPHQIHLGELHAILRRQEDFYPFLKDNREKIEKILTFRIPYYVGPLARGNSRFAWMTRKSEETITPWNFEEVVDKGASAQSFIERMTNFDKNLPNEKVLPKHSLLYEYFTVYNELTKVKYVTEGMRKPAFLSGEQKKAIVDLLFKTNRKVTVKQLKEDYFKKIECFDSVEISGVEDRFNASLGTYHDLLKIIKDKDFLDNEENEDILEDIVLTLTLFEDREMIEERLKTYAHLFDDKVMKQLKRRRYTGWGRLSRKLINGIRDKQSGKTILDFLKSDGFANRNFMQLIHDDSLTFKEDIQKAQVSGQGDSLHEHIANLAGSPAIKKGILQTVKVVDELVKVMGRHKPENIVIEMARENQTTQKGQKNSRERMKRIEEGIKELGSQILKEHPVENTQLQNEKLYLYYLQNGRDMYVDQELDINRLSDYDVDHIVPQSFLKDDSIDNKVLTRSDKARGKSDNVPSEEVVKKMKNYWRQLLNAKLITQRKFDNLTKAERGGLSELDKAGFIKRQLVETRQITKHVAQILDSRMNTKYDENDKLIREVKVITLKSKLVSDFRKDFQFYKVREINNYHHAHDAYLNAVVGTALIKKYPKLESEFVYGDYKVYDVRKMIAKSEQEIGKATAKYFFYSNIMNFFKTEITLANGEIRKRPLIETNGETGEIVWDKGRDFATVRKVLSMPQVNIVKKTEVQTGGFSKESILPKRNSDKLIARKKDWDPKKYGGFDSPTVAYSVLVVAKVEKGKSKKLKSVKELLGITIMERSSFEKNPIDFLEAKGYKEVKKDLIIKLPKYSLFELENGRKRMLASAGELQKGNELALPSKYVNFLYLASHYEKLKGSPEDNEQKQLFVEQHKHYLDEIIEQISEFSKRVILADANLDKVLSAYNKHRDKPIREQAENIIHLFTLTNLGAPAAFKYFDTTIDRKRYTSTKEVLDATLIHQSITGLYETRIDLSQLGGDGGGGSGGGPAPGGTVSLQDEHRLFDIPVTTSLPDVWLQDFPQAWAETGGLGRAKCQAPIIIDLKPTAVPVSIKQYPMSLEAHMGIRQHIIKFLELGVLRPCRSPWNTPLLPVKKPGTQDYRPVQDLREINKRTVDIHPTVPNPYNLLSTLKPDYSWYTVLDLKDAFFCLPLAPQSQELFAFEWKDPERGISGQLTWTRLPQGFKNSPTLFNEALHRDLTDFRTQHPEVTLLQYVDDLLLAAPTKKACTQGTRHLLQELGEKGYRASAKKAQICQTKVTYLGYILSEGKRWLTPGRIETVARIPPPRNPREVREFLGTAGFCRLWIPGFAELAAPLYALTKPSTPFTWQTEHQLAFEALKKALLSAPALGLPDTSKPFTLFLDERQGIAKGVLTQKLGPWKRPVAYLSKKLDPVAAGWPPCLRIMAATAMLVKDSAKLTLGQPLTVITPHTLEAIVRQPPDRWITNARLTHYQALLLDTDRVQFGPPVTLNPATLLPVPENQPSPHDCRQVLAETHGTREDLKDQELPDADHTWYTDGSSYLDSGTRRAGAAVVDGHNTIWAQSLPPGTSAQKAELIALTKALELSKGKKANIYTDSRYAFATAHTHGSIYERRGWLTSEGKEIKNKAEIIALLKALFLPQEVAIIHCPGHQKGQDPVAVGNRQADRVARQAAMAEVLTLATEPDNTSHITAGKRTADGSEFEKRTADGSEFESPKKKAKVE

SEQ ID NO: 6974 - protein, 2092 aa, synthetic construct
MPAAKRVKLDGGDKKYSIGLDIGTNSVGWAVITDEYKVPSKKFKVLGNTDRHSIKKNLIGALLFDSGETAEATRLKRTARRRYTRRKNRICYLQEIFSNEMAKVDDSFFHRLEESFLVEEDKKHERHPIFGNIVDEVAYHEKYPTIYHLRKKLVDSTDKADLRLIYLALAHMIKFRGHFLIEGDLNPDNSDVDKLFIQLVQTYNQLFEENPINASGVDAKAILSARLSKSRRLENLIAQLPGEKKNGLFGNLIALSLGLTPNFKSNFDLAEDAKLQLSKDTYDDDLDNLLAQIGDQYADLFLAAKNLSDAILLSDILRVNTEITKAPLSASMIKRYDEHHQDLTLLKALVRQQLPEKYKEIFFDQSKNGYAGYIDGGASQEEFYKFIKPILEKMDGTEELLVKLNREDLLRKQRTFDNGSIPHQIHLGELHAILRRQEDFYPFLKDNREKIEKILTFRIPYYVGPLARGNSRFAWMTRKSEETITPWNFEEVVDKGASAQSFIERMTNFDKNLPNEKVLPKHSLLYEYFTVYNELTKVKYVTEGMRKPAFLSGEQKKAIVDLLFKTNRKVTVKQLKEDYFKKIECFDSVEISGVEDRFNASLGTYHDLLKIIKDKDFLDNEENEDILEDIVLTLTLFEDREMIEERLKTYAHLFDDKVMKQLKRRRYTGWGRLSRKLINGIRDKQSGKTILDFLKSDGFANRNFMQLIHDDSLTFKEDIQKAQVSGQGDSLHEHIANLAGSPAIKKGILQTVKVVDELVKVMGRHKPENIVIEMARENQTTQKGQKNSRERMKRIEEGIKELGSQILKEHPVENTQLQNEKLYLYYLQNGRDMYVDQELDINRLSDYDVDHIVPQSFLKDDSIDNKVLTRSDKARGKSDNVPSEEVVKKMKNYWRQLLNAKLITQRKFDNLTKAERGGLSELDKAGFIKRQLVETRQITKHVAQILDSRMNTKYDENDKLIREVKVITLKSKLVSDFRKDFQFYKVREINNYHHAHDAYLNAVVGTALIKKYPKLESEFVYGDYKVYDVRKMIAKSEQEIGKATAKYFFYSNIMNFFKTEITLANGEIRKRPLIETNGETGEIVWDKGRDFATVRKVLSMPQVNIVKKTEVQTGGFSKESILPKRNSDKLIARKKDWDPKKYGGFDSPTVAYSVLVVAKVEKGKSKKLKSVKELLGITIMERSSFEKNPIDFLEAKGYKEVKKDLIIKLPKYSLFELENGRKRMLASAGELQKGNELALPSKYVNFLYLASHYEKLKGSPEDNEQKQLFVEQHKHYLDEIIEQISEFSKRVILADANLDKVLSAYNKHRDKPIREQAENIIHLFTLTNLGAPAAFKYFDTTIDRKRYTSTKEVLDATLIHQSITGLYETRIDLSQLGGDGGGGSGGGPAPGGVLNLEEEYRLHEKPVPSSIDPSWLQLFPTVWAERAGMGLANQVPPVVVELRSGASPVAVRQYPMSKEAREGIRPHIQKFLDLGVLVPCRSPWNTPLLPVKKPGTNDYRPVQDLREINKRVQDIHPTVPNPYNLLSSLPPSYTWYSVLDLKDAFFCLRLHPNSQPLFAFEWKDPEKGNTGQLTWTRLPQGFKNSPTLFNEALHRDLAPFRALNPQVVLLQYVDDLLVAAPTYEDCKKGTQKLLQELSKLGYRVSAKKAQLCQREVTYLGYLLKEGKRWLTPARKATVMKIPVPTTPRQVREFLGTAGFCRLWIPGFASLAAPLYPLTKPSIPFIWTEEHQQAFDHIKKALLSAPALALPDLTKPFTLYIDERAGVARGVLTQTLGPWRRPVAYLSKKLDPVASGWPTCLKAVAAVALLLKDADKLTLGQNVTVIASHSLESIVRQPPDRWMTNARMTHYQSLLLNERVSFAPPAVLNPATLLPVESEATPVHRCSEILAEETGTRRDLEDQPLPGVPTWYTDGSSFITEGKRRAGAPIVDGKRTVWASSLPEGTSAQKAELVALTQALRLAEGKNINIYTDSRYAFATAHIHGAIYKQRGWLTSAGKDIKNKEEILALLEAIHLPRRVAIIHCPGHQRGSNPVATGNRRADEAAKQAALSTRVLAGTTKPAGKRTADGSEFEKRTADGSEFESPKKKAKVE

SEQ ID NO: 6975 - protein, 2092 aa, synthetic construct
MPAAKRVKLDGGDKKYSIGLDIGTNSVGWAVITDEYKVPSKKFKVLGNTDRHSIKKNLIGALLFDSGETAEATRLKRTARRRYTRRKNRICYLQEIFSNEMAKVDDSFFHRLEESFLVEEDKKHERHPIFGNIVDEVAYHEKYPTIYHLRKKLVDSTDKADLRLIYLALAHMIKFRGHFLIEGDLNPDNSDVDKLFIQLVQTYNQLFEENPINASGVDAKAILSARLSKSRRLENLIAQLPGEKKNGLFGNLIALSLGLTPNFKSNFDLAEDAKLQLSKDTYDDDLDNLLAQIGDQYADLFLAAKNLSDAILLSDILRVNTEITKAPLSASMIKRYDEHHQDLTLLKALVRQQLPEKYKEIFFDQSKNGYAGYIDGGASQEEFYKFIKPILEKMDGTEELLVKLNREDLLRKQRTFDNGSIPHQIHLGELHAILRRQEDFYPFLKDNREKIEKILTFRIPYYVGPLARGNSRFAWMTRKSEETITPWNFEEVVDKGASAQSFIERMTNFDKNLPNEKVLPKHSLLYEYFTVYNELTKVKYVTEGMRKPAFLSGEQKKAIVDLLFKTNRKVTVKQLKEDYFKKIECFDSVEISGVEDRFNASLGTYHDLLKIIKDKDFLDNEENEDILEDIVLTLTLFEDREMIEERLKTYAHLFDDKVMKQLKRRRYTGWGRLSRKLINGIRDKQSGKTILDFLKSDGFANRNFMQLIHDDSLTFKEDIQKAQVSGQGDSLHEHIANLAGSPAIKKGILQTVKVVDELVKVMGRHKPENIVIEMARENQTTQKGQKNSRERMKRIEEGIKELGSQILKEHPVENTQLQNEKLYLYYLQNGRDMYVDQELDINRLSDYDVDHIVPQSFLKDDSIDNKVLTRSDKARGKSDNVPSEEVVKKMKNYWRQLLNAKLITQRKFDNLTKAERGGLSELDKAGFIKRQLVETRQITKHVAQILDSRMNTKYDENDKLIREVKVITLKSKLVSDFRKDFQFYKVREINNYHHAHDAYLNAVVGTALIKKYPKLESEFVYGDYKVYDVRKMIAKSEQEIGKATAKYFFYSNIMNFFKTEITLANGEIRKRPLIETNGETGEIVWDKGRDFATVRKVLSMPQVNIVKKTEVQTGGFSKESILPKRNSDKLIARKKDWDPKKYGGFDSPTVAYSVLVVAKVEKGKSKKLKSVKELLGITIMERSSFEKNPIDFLEAKGYKEVKKDLIIKLPKYSLFELENGRKRMLASAGELQKGNELALPSKYVNFLYLASHYEKLKGSPEDNEQKQLFVEQHKHYLDEIIEQISEFSKRVILADANLDKVLSAYNKHRDKPIREQAENIIHLFTLTNLGAPAAFKYFDTTIDRKRYTSTKEVLDATLIHQSITGLYETRIDLSQLGGDGGGGSGGGPAPGGVLNLEEEYRLHEKPVPSSIDPSWLQLFPTVWAERAGMGLANQVPPVVVELRSGASPVAVRQYPMSKEAREGIRPHIQKFLDLGVLVPCRSPWNTPLLPVKKPGTNDYRPVQDLREINKRVQDIHPTVPNPYNLLSSLPPSYTWYSVLDLKDAFFCLRLHPNSQPLFAFEWKDPEKGNTGQLTWTRLPQGFKNSPTLFNEALHRDLAPFRALNPQVVLLQYVDDLLVAAPTYEDCKKGTQKLLQELSKLGYRVSAKKAQLCQREVTYLGYLLKEGKRWLTPARKATVMKIPVPTTPRQVREFLGKAGFCRLFIPGFASLAAPLYPLTKPSIPFIWTEEHQQAFDHIKKALLSAPALALPDLTKPFTLYIDERAGVARGVLTQTLGPWRRPVAYLSKKLDPVASGWPTCLKAVAAVALLLKDADKLTLGQNVTVIASHSLESIVRQPPDRWMTNARMTHYQSLLLNERVSFAPPAVLNPATLLPVESEATPVHRCSEILAEETGTRRDLEDQPLPGVPTWYTDGSSFITEGKRRAGAPIVDGKRTVWASSLPEGTSAQKAELVALTQALRLAEGKNINIYTDSRYAFATAHIHGAIYKQRGWLTSAGKDIKNKEEILALLEAIHLPRRVAIIHCPGHQRGSNPVATGNRRADEAAKQAALSTRVLAGTTKPAGKRTADGSEFEKRTADGSEFESPKKKAKVE

SEQ ID NO: 6976 - protein, 2125 aa, synthetic construct
MPAAKRVKLDGGDKKYSIGLDIGTNSVGWAVITDEYKVPSKKFKVLGNTDRHSIKKNLIGALLFDSGETAEATRLKRTARRRYTRRKNRICYLQEIFSNEMAKVDDSFFHRLEESFLVEEDKKHERHPIFGNIVDEVAYHEKYPTIYHLRKKLVDSTDKADLRLIYLALAHMIKFRGHFLIEGDLNPDNSDVDKLFIQLVQTYNQLFEENPINASGVDAKAILSARLSKSRRLENLIAQLPGEKKNGLFGNLIALSLGLTPNFKSNFDLAEDAKLQLSKDTYDDDLDNLLAQIGDQYADLFLAAKNLSDAILLSDILRVNTEITKAPLSASMIKRYDEHHQDLTLLKALVRQQLPEKYKEIFFDQSKNGYAGYIDGGASQEEFYKFIKPILEKMDGTEELLVKLNREDLLRKQRTFDNGSIPHQIHLGELHAILRRQEDFYPFLKDNREKIEKILTFRIPYYVGPLARGNSRFAWMTRKSEETITPWNFEEVVDKGASAQSFIERMTNFDKNLPNEKVLPKHSLLYEYFTVYNELTKVKYVTEGMRKPAFLSGEQKKAIVDLLFKTNRKVTVKQLKEDYFKKIECFDSVEISGVEDRFNASLGTYHDLLKIIKDKDFLDNEENEDILEDIVLTLTLFEDREMIEERLKTYAHLFDDKVMKQLKRRRYTGWGRLSRKLINGIRDKQSGKTILDFLKSDGFANRNFMQLIHDDSLTFKEDIQKAQVSGQGDSLHEHIANLAGSPAIKKGILQTVKVVDELVKVMGRHKPENIVIEMARENQTTQKGQKNSRERMKRIEEGIKELGSQILKEHPVENTQLQNEKLYLYYLQNGRDMYVDQELDINRLSDYDVDHIVPQSFLKDDSIDNKVLTRSDKARGKSDNVPSEEVVKKMKNYWRQLLNAKLITQRKFDNLTKAERGGLSELDKAGFIKRQLVETRQITKHVAQILDSRMNTKYDENDKLIREVKVITLKSKLVSDFRKDFQFYKVREINNYHHAHDAYLNAVVGTALIKKYPKLESEFVYGDYKVYDVRKMIAKSEQEIGKATAKYFFYSNIMNFFKTEITLANGEIRKRPLIETNGETGEIVWDKGRDFATVRKVLSMPQVNIVKKTEVQTGGFSKESILPKRNSDKLIARKKDWDPKKYGGFDSPTVAYSVLVVAKVEKGKSKKLKSVKELLGITIMERSSFEKNPIDFLEAKGYKEVKKDLIIKLPKYSLFELENGRKRMLASAGELQKGNELALPSKYVNFLYLASHYEKLKGSPEDNEQKQLFVEQHKHYLDEIIEQISEFSKRVILADANLDKVLSAYNKHRDKPIREQAENIIHLFTLTNLGAPAAFKYFDTTIDRKRYTSTKEVLDATLIHQSITGLYETRIDLSQLGGDGGGGSGGGPAPGGLLGRDLLTKLKAQIQFSTEGPQVTWEDRPAMCLVLNLEEEYRLHEKPVPPSIDPSWLQLFPMVWAEKAGMGLANQVPPVVVELKSDASPVAVRQYPMSKEAREGIRPHIQRFLDLGILVPCQSPWNTPLLPVKKPGTNDYRPVQDLREVNKRVQDIHPTVPNPYNLLSSLPPSHTWYSVLDLKDAFFCLKLHPNSQPLFAFEWRDPEKGNTGQLTWTRLPQGFKNSPTLFNEALHRDLASFRALNPQVVMLQYVDDLLVAAPTYRDCKEGTRRLLQELSKLGYRVSAKKAQLCREEVTYLGYLLKGGKRWLTPARKATVMKIPTPTTPRQVREFLGTAGFCRLWIPGFASLAAPLYPLTRPKVPFTWTEAHQEAFGRIKEALLSAPALALPDLTKPFALYVDEKEGVARGVLTQTLGPWRRPVAYLSKKLDPVASGWPTCLKAIAAVALLLKDADKLTLGQNVLVIAPHNLESIVRQPPDRWMTNARMTHYQSLLLNERVSFAPPAILNPATLLPVESDDTPIHICSEILAEETGTRPDLRDQPLPGVPAWYTDGSSFIMDGRRQAGAAIVDNKRTVWASNLPEGTSAQKAELIALTQALRLAEGKSINIYTDSRYAFATAHVHGAIYKQRGWLTSAGKDIKNKEEILALLEAIHLPKRVAIIHCPGHQRGTDPVATGNRKADEAAKQAAQSTRILTETTKNAGKRTADGSEFEKRTADGSEFESPKKKAKVE

SEQ ID NO: 6977 - protein, 2125 aa, synthetic construct
MPAAKRVKLDGGDKKYSIGLDIGTNSVGWAVITDEYKVPSKKFKVLGNTDRHSIKKNLIGALLFDSGETAEATRLKRTARRRYTRRKNRICYLQEIFSNEMAKVDDSFFHRLEESFLVEEDKKHERHPIFGNIVDEVAYHEKYPTIYHLRKKLVDSTDKADLRLIYLALAHMIKFRGHFLIEGDLNPDNSDVDKLFIQLVQTYNQLFEENPINASGVDAKAILSARLSKSRRLENLIAQLPGEKKNGLFGNLIALSLGLTPNFKSNFDLAEDAKLQLSKDTYDDDLDNLLAQIGDQYADLFLAAKNLSDAILLSDILRVNTEITKAPLSASMIKRYDEHHQDLTLLKALVRQQLPEKYKEIFFDQSKNGYAGYIDGGASQEEFYKFIKPILEKMDGTEELLVKLNREDLLRKQRTFDNGSIPHQIHLGELHAILRRQEDFYPFLKDNREKIEKILTFRIPYYVGPLARGNSRFAWMTRKSEETITPWNFEEVVDKGASAQSFIERMTNFDKNLPNEKVLPKHSLLYEYFTVYNELTKVKYVTEGMRKPAFLSGEQKKAIVDLLFKTNRKVTVKQLKEDYFKKIECFDSVEISGVEDRFNASLGTYHDLLKIIKDKDFLDNEENEDILEDIVLTLTLFEDREMIEERLKTYAHLFDDKVMKQLKRRRYTGWGRLSRKLINGIRDKQSGKTILDFLKSDGFANRNFMQLIHDDSLTFKEDIQKAQVSGQGDSLHEHIANLAGSPAIKKGILQTVKVVDELVKVMGRHKPENIVIEMARENQTTQKGQKNSRERMKRIEEGIKELGSQILKEHPVENTQLQNEKLYLYYLQNGRDMYVDQELDINRLSDYDVDHIVPQSFLKDDSIDNKVLTRSDKARGKSDNVPSEEVVKKMKNYWRQLLNAKLITQRKFDNLTKAERGGLSELDKAGFIKRQLVETRQITKHVAQILDSRMNTKYDENDKLIREVKVITLKSKLVSDFRKDFQFYKVREINNYHHAHDAYLNAVVGTALIKKYPKLESEFVYGDYKVYDVRKMIAKSEQEIGKATAKYFFYSNIMNFFKTEITLANGEIRKRPLIETNGETGEIVWDKGRDFATVRKVLSMPQVNIVKKTEVQTGGFSKESILPKRNSDKLIARKKDWDPKKYGGFDSPTVAYSVLVVAKVEKGKSKKLKSVKELLGITIMERSSFEKNPIDFLEAKGYKEVKKDLIIKLPKYSLFELENGRKRMLASAGELQKGNELALPSKYVNFLYLASHYEKLKGSPEDNEQKQLFVEQHKHYLDEIIEQISEFSKRVILADANLDKVLSAYNKHRDKPIREQAENIIHLFTLTNLGAPAAFKYFDTTIDRKRYTSTKEVLDATLIHQSITGLYETRIDLSQLGGDGGGGSGGGPAPGGLLGRDLLTKLKAQIQFSTEGPQVTWEDRPAMCLVLNLEEEYRLHEKPVPPSIDPSWLQLFPMVWAEKAGMGLANQVPPVVVELKSDASPVAVRQYPMSKEAREGIRPHIQRFLDLGILVPCQSPWNTPLLPVKKPGTNDYRPVQDLREVNKRVQDIHPTVPNPYNLLSSLPPSHTWYSVLDLKDAFFCLKLHPNSQPLFAFEWRDPEKGNTGQLTWTRLPQGFKNSPTLFNEALHRDLASFRALNPQVVMLQYVDDLLVAAPTYRDCKEGTRRLLQELSKLGYRVSAKKAQLCREEVTYLGYLLKGGKRWLTPARKATVMKIPTPTTPRQVREFLGKAGFCRLFIPGFASLAAPLYPLTRPKVPFTWTEAHQEAFGRIKEALLSAPALALPDLTKPFALYVDEKEGVARGVLTQTLGPWRRPVAYLSKKLDPVASGWPTCLKAIAAVALLLKDADKLTLGQNVLVIAPHNLESIVRQPPDRWMTNARMTHYQSLLLNERVSFAPPAILNPATLLPVESDDTPIHICSEILAEETGTRPDLRDQPLPGVPAWYTDGSSFIMDGRRQAGAAIVDNKRTVWASNLPEGTSAQKAELIALTQALRLAEGKSINIYTDSRYAFATAHVHGAIYKQRGWLTSAGKDIKNKEEILALLEAIHLPKRVAIIHCPGHQRGTDPVATGNRKADEAAKQAAQSTRILTETTKNAGKRTADGSEFEKRTADGSEFESPKKKAKVE

SEQ ID NO: 6978 - protein, 2094 aa, synthetic construct
MPAAKRVKLDGGDKKYSIGLDIGTNSVGWAVITDEYKVPSKKFKVLGNTDRHSIKKNLIGALLFDSGETAEATRLKRTARRRYTRRKNRICYLQEIFSNEMAKVDDSFFHRLEESFLVEEDKKHERHPIFGNIVDEVAYHEKYPTIYHLRKKLVDSTDKADLRLIYLALAHMIKFRGHFLIEGDLNPDNSDVDKLFIQLVQTYNQLFEENPINASGVDAKAILSARLSKSRRLENLIAQLPGEKKNGLFGNLIALSLGLTPNFKSNFDLAEDAKLQLSKDTYDDDLDNLLAQIGDQYADLFLAAKNLSDAILLSDILRVNTEITKAPLSASMIKRYDEHHQDLTLLKALVRQQLPEKYKEIFFDQSKNGYAGYIDGGASQEEFYKFIKPILEKMDGTEELLVKLNREDLLRKQRTFDNGSIPHQIHLGELHAILRRQEDFYPFLKDNREKIEKILTFRIPYYVGPLARGNSRFAWMTRKSEETITPWNFEEVVDKGASAQSFIERMTNFDKNLPNEKVLPKHSLLYEYFTVYNELTKVKYVTEGMRKPAFLSGEQKKAIVDLLFKTNRKVTVKQLKEDYFKKIECFDSVEISGVEDRFNASLGTYHDLLKIIKDKDFLDNEENEDILEDIVLTLTLFEDREMIEERLKTYAHLFDDKVMKQLKRRRYTGWGRLSRKLINGIRDKQSGKTILDFLKSDGFANRNFMQLIHDDSLTFKEDIQKAQVSGQGDSLHEHIANLAGSPAIKKGILQTVKVVDELVKVMGRHKPENIVIEMARENQTTQKGQKNSRERMKRIEEGIKELGSQILKEHPVENTQLQNEKLYLYYLQNGRDMYVDQELDINRLSDYDVDHIVPQSFLKDDSIDNKVLTRSDKARGKSDNVPSEEVVKKMKNYWRQLLNAKLITQRKFDNLTKAERGGLSELDKAGFIKRQLVETRQITKHVAQILDSRMNTKYDENDKLIREVKVITLKSKLVSDFRKDFQFYKVREINNYHHAHDAYLNAVVGTALIKKYPKLESEFVYGDYKVYDVRKMIAKSEQEIGKATAKYFFYSNIMNFFKTEITLANGEIRKRPLIETNGETGEIVWDKGRDFATVRKVLSMPQVNIVKKTEVQTGGFSKESILPKRNSDKLIARKKDWDPKKYGGFDSPTVAYSVLVVAKVEKGKSKKLKSVKELLGITIMERSSFEKNPIDFLEAKGYKEVKKDLIIKLPKYSLFELENGRKRMLASAGELQKGNELALPSKYVNFLYLASHYEKLKGSPEDNEQKQLFVEQHKHYLDEIIEQISEFSKRVILADANLDKVLSAYNKHRDKPIREQAENIIHLFTLTNLGAPAAFKYFDTTIDRKRYTSTKEVLDATLIHQSITGLYETRIDLSQLGGDGGGGSGGGPAPGGTLNLEDEYRLYETSAEPEVSPGSTWLSDFPQAWAETGGMGLAVRQAPLIIPLKATSTPVSIKQYPMSQEAKLGIKPHIQRLLDQGILVPCQSPWNTPLLPVKKPGTNDYRPVQDLREVNKRVEDIHPTVPNPYNLLSGLPPSHRWYTVLDLKDAFFCLRLHPTSQPLFAFEWRDPGMGISGQLTWTRLPQGFKNSPTLFNEALHRDLADFRIQHPDLILLQYVDDILLAATSELDCQQGTRALLLTLGNLGYRASAKKAQLCQKQVKYLGYLLKEGQRWLTEARKETVMGQPTPKTPRQLREFLGTAGFCRLWIPGFAEMAAPLYPLTKPGTLFNWGPDQQKAYQEIKQALLTAPALGLPDLTKPFELFVDEKQGYAKGVLTQKLGPWRRPVAYLSKKLDPVAAGWPPCLRMVAAIAVLRKDAGKLTMGQPLVILAPHAVEALVKQPPDRWLSNARMTHYQAMLLDTDRVQFGPVVALNPATLLPLPEEGAPHDCLEILAETHGTRPDLTDQPIPDADHTWYTDGSSFLQEGQRKAGAAVTTETEVIWARALPAGTSAQRAELIALTQALKMAEGKRLNVYTDSRYAFATAHIHGEIYRRRGWLTSEGREIKNKSEILALLKALFLPKRLSIIHCLGHQKGDSAEARGNRLADQAAREAAIKTPPDTSTLLAGKRTADGSEFEKRTADGSEFESPKKKAKVE

SEQ ID NO: 6979 - protein, 2094 aa, synthetic construct
MPAAKRVKLDGGDKKYSIGLDIGTNSVGWAVITDEYKVPSKKFKVLGNTDRHSIKKNLIGALLFDSGETAEATRLKRTARRRYTRRKNRICYLQEIFSNEMAKVDDSFFHRLEESFLVEEDKKHERHPIFGNIVDEVAYHEKYPTIYHLRKKLVDSTDKADLRLIYLALAHMIKFRGHFLIEGDLNPDNSDVDKLFIQLVQTYNQLFEENPINASGVDAKAILSARLSKSRRLENLIAQLPGEKKNGLFGNLIALSLGLTPNFKSNFDLAEDAKLQLSKDTYDDDLDNLLAQIGDQYADLFLAAKNLSDAILLSDILRVNTEITKAPLSASMIKRYDEHHQDLTLLKALVRQQLPEKYKEIFFDQSKNGYAGYIDGGASQEEFYKFIKPILEKMDGTEELLVKLNREDLLRKQRTFDNGSIPHQIHLGELHAILRRQEDFYPFLKDNREKIEKILTFRIPYYVGPLARGNSRFAWMTRKSEETITPWNFEEVVDKGASAQSFIERMTNFDKNLPNEKVLPKHSLLYEYFTVYNELTKVKYVTEGMRKPAFLSGEQKKAIVDLLFKTNRKVTVKQLKEDYFKKIECFDSVEISGVEDRFNASLGTYHDLLKIIKDKDFLDNEENEDILEDIVLTLTLFEDREMIEERLKTYAHLFDDKVMKQLKRRRYTGWGRLSRKLINGIRDKQSGKTILDFLKSDGFANRNFMQLIHDDSLTFKEDIQKAQVSGQGDSLHEHIANLAGSPAIKKGILQTVKVVDELVKVMGRHKPENIVIEMARENQTTQKGQKNSRERMKRIEEGIKELGSQILKEHPVENTQLQNEKLYLYYLQNGRDMYVDQELDINRLSDYDVDHIVPQSFLKDDSIDNKVLTRSDKARGKSDNVPSEEVVKKMKNYWRQLLNAKLITQRKFDNLTKAERGGLSELDKAGFIKRQLVETRQITKHVAQILDSRMNTKYDENDKLIREVKVITLKSKLVSDFRKDFQFYKVREINNYHHAHDAYLNAVVGTALIKKYPKLESEFVYGDYKVYDVRKMIAKSEQEIGKATAKYFFYSNIMNFFKTEITLANGEIRKRPLIETNGETGEIVWDKGRDFATVRKVLSMPQVNIVKKTEVQTGGFSKESILPKRNSDKLIARKKDWDPKKYGGFDSPTVAYSVLVVAKVEKGKSKKLKSVKELLGITIMERSSFEKNPIDFLEAKGYKEVKKDLIIKLPKYSLFELENGRKRMLASAGELQKGNELALPSKYVNFLYLASHYEKLKGSPEDNEQKQLFVEQHKHYLDEIIEQISEFSKRVILADANLDKVLSAYNKHRDKPIREQAENIIHLFTLTNLGAPAAFKYFDTTIDRKRYTSTKEVLDATLIHQSITGLYETRIDLSQLGGDGGGGSGGGPAPGGTLNLEDEYRLYETSAEPEVSPGSTWLSDFPQAWAETGGMGLAVRQAPLIIPLKATSTPVSIKQYPMSQEAKLGIKPHIQRLLDQGILVPCQSPWNTPLLPVKKPGTNDYRPVQDLREVNKRVEDIHPTVPNPYNLLSGLPPSHRWYTVLDLKDAFFCLRLHPTSQPLFAFEWRDPGMGISGQLTWTRLPQGFKNSPTLFNEALHRDLADFRIQHPDLILLQYVDDILLAATSELDCQQGTRALLLTLGNLGYRASAKKAQLCQKQVKYLGYLLKEGQRWLTEARKETVMGQPTPKTPRQLREFLGKAGFCRLFIPGFAEMAAPLYPLTKPGTLFNWGPDQQKAYQEIKQALLTAPALGLPDLTKPFELFVDEKQGYAKGVLTQKLGPWRRPVAYLSKKLDPVAAGWPPCLRMVAAIAVLRKDAGKLTMGQPLVILAPHAVEALVKQPPDRWLSNARMTHYQAMLLDTDRVQFGPVVALNPATLLPLPEEGAPHDCLEILAETHGTRPDLTDQPIPDADHTWYTDGSSFLQEGQRKAGAAVTTETEVIWARALPAGTSAQRAELIALTQALKMAEGKRLNVYTDSRYAFATAHIHGEIYRRRGWLTSEGREIKNKSEILALLKALFLPKRLSIIHCLGHQKGDSAEARGNRLADQAAREAAIKTPPDTSTLLAGKRTADGSEFEKRTADGSEFESPKKKAKVE

SEQ ID NO: 6980 - protein, 2094 aa, synthetic construct
MPAAKRVKLDGGDKKYSIGLDIGTNSVGWAVITDEYKVPSKKFKVLGNTDRHSIKKNLIGALLFDSGETAEATRLKRTARRRYTRRKNRICYLQEIFSNEMAKVDDSFFHRLEESFLVEEDKKHERHPIFGNIVDEVAYHEKYPTIYHLRKKLVDSTDKADLRLIYLALAHMIKFRGHFLIEGDLNPDNSDVDKLFIQLVQTYNQLFEENPINASGVDAKAILSARLSKSRRLENLIAQLPGEKKNGLFGNLIALSLGLTPNFKSNFDLAEDAKLQLSKDTYDDDLDNLLAQIGDQYADLFLAAKNLSDAILLSDILRVNTEITKAPLSASMIKRYDEHHQDLTLLKALVRQQLPEKYKEIFFDQSKNGYAGYIDGGASQEEFYKFIKPILEKMDGTEELLVKLNREDLLRKQRTFDNGSIPHQIHLGELHAILRRQEDFYPFLKDNREKIEKILTFRIPYYVGPLARGNSRFAWMTRKSEETITPWNFEEVVDKGASAQSFIERMTNFDKNLPNEKVLPKHSLLYEYFTVYNELTKVKYVTEGMRKPAFLSGEQKKAIVDLLFKTNRKVTVKQLKEDYFKKIECFDSVEISGVEDRFNASLGTYHDLLKIIKDKDFLDNEENEDILEDIVLTLTLFEDREMIEERLKTYAHLFDDKVMKQLKRRRYTGWGRLSRKLINGIRDKQSGKTILDFLKSDGFANRNFMQLIHDDSLTFKEDIQKAQVSGQGDSLHEHIANLAGSPAIKKGILQTVKVVDELVKVMGRHKPENIVIEMARENQTTQKGQKNSRERMKRIEEGIKELGSQILKEHPVENTQLQNEKLYLYYLQNGRDMYVDQELDINRLSDYDVDHIVPQSFLKDDSIDNKVLTRSDKARGKSDNVPSEEVVKKMKNYWRQLLNAKLITQRKFDNLTKAERGGLSELDKAGFIKRQLVETRQITKHVAQILDSRMNTKYDENDKLIREVKVITLKSKLVSDFRKDFQFYKVREINNYHHAHDAYLNAVVGTALIKKYPKLESEFVYGDYKVYDVRKMIAKSEQEIGKATAKYFFYSNIMNFFKTEITLANGEIRKRPLIETNGETGEIVWDKGRDFATVRKVLSMPQVNIVKKTEVQTGGFSKESILPKRNSDKLIARKKDWDPKKYGGFDSPTVAYSVLVVAKVEKGKSKKLKSVKELLGITIMERSSFEKNPIDFLEAKGYKEVKKDLIIKLPKYSLFELENGRKRMLASAGELQKGNELALPSKYVNFLYLASHYEKLKGSPEDNEQKQLFVEQHKHYLDEIIEQISEFSKRVILADANLDKVLSAYNKHRDKPIREQAENIIHLFTLTNLGAPAAFKYFDTTIDRKRYTSTKEVLDATLIHQSITGLYETRIDLSQLGGDGGGGSGGGPAPGGTLNIEDEYRLHETSKGPDVPLGSTWLSDFPQAWAETGGMGLAVRQAPLIIPLKATSTPVSIKQYPMSQEARLGIKPHIQRLLDQGILVPCQSPWNTPLLPVKKPGTNDYRPVQDLREVNKRVEDIHPTVPNPYNLLSGLPPSHQWYTVLDLKDAFFCLRLHPTSQSLFAFEWRDPEMGISGQLTWTRLPQGFKNSPTLFNEALHRDLADFRIQHPDLILLQYVDDLLLAATSELDCQQGTRALLQTLGDLGYRASAKKAQICQKQVKYLGYLLKEGQRWLTEARKETVMGQPTPKTPRQLREFLGKAGFCRLFIPGFAEMAAPLYPLTKPGTLFEWGPDQQKAYQEIKQALLTAPALGLPDLTKPFELFVDEKQGYAKGVLTQKLGPWRRPVAYLSKKLDPVAAGWPPCLRMVAAIAVLTKDAGKLTMGQPLVILAPHAVEALVKQPPDRWLSNARMTHYQALLLDTDRVQFGPIVALNPATLLPLPEEGLQHDCLDILAEAHGTRPDLTDQPLPDADHTWYTDGSSFLQEGQRKAGAAVTTETEVVWAKALPAGTSAQRAELIALTQALKMAEGKKLNVYTDSRYAFATAHIHGEIYRRRGWLTSEGKEIKNKDEILALLKALFLPKRLSIIHCPGHQKGNRAEARGNRMADQAAREVATRETPETSTLLAGKRTADGSEFEKRTADGSEFESPKKKAKVE

SEQ ID NO: 6981 - protein, 2114 aa, synthetic construct
MPAAKRVKLDGGDKKYSIGLDIGTNSVGWAVITDEYKVPSKKFKVLGNTDRHSIKKNLIGALLFDSGETAEATRLKRTARRRYTRRKNRICYLQEIFSNEMAKVDDSFFHRLEESFLVEEDKKHERHPIFGNIVDEVAYHEKYPTIYHLRKKLVDSTDKADLRLIYLALAHMIKFRGHFLIEGDLNPDNSDVDKLFIQLVQTYNQLFEENPINASGVDAKAILSARLSKSRRLENLIAQLPGEKKNGLFGNLIALSLGLTPNFKSNFDLAEDAKLQLSKDTYDDDLDNLLAQIGDQYADLFLAAKNLSDAILLSDILRVNTEITKAPLSASMIKRYDEHHQDLTLLKALVRQQLPEKYKEIFFDQSKNGYAGYIDGGASQEEFYKFIKPILEKMDGTEELLVKLNREDLLRKQRTFDNGSIPHQIHLGELHAILRRQEDFYPFLKDNREKIEKILTFRIPYYVGPLARGNSRFAWMTRKSEETITPWNFEEVVDKGASAQSFIERMTNFDKNLPNEKVLPKHSLLYEYFTVYNELTKVKYVTEGMRKPAFLSGEQKKAIVDLLFKTNRKVTVKQLKEDYFKKIECFDSVEISGVEDRFNASLGTYHDLLKIIKDKDFLDNEENEDILEDIVLTLTLFEDREMIEERLKTYAHLFDDKVMKQLKRRRYTGWGRLSRKLINGIRDKQSGKTILDFLKSDGFANRNFMQLIHDDSLTFKEDIQKAQVSGQGDSLHEHIANLAGSPAIKKGILQTVKVVDELVKVMGRHKPENIVIEMARENQTTQKGQKNSRERMKRIEEGIKELGSQILKEHPVENTQLQNEKLYLYYLQNGRDMYVDQELDINRLSDYDVDHIVPQSFLKDDSIDNKVLTRSDKARGKSDNVPSEEVVKKMKNYWRQLLNAKLITQRKFDNLTKAERGGLSELDKAGFIKRQLVETRQITKHVAQILDSRMNTKYDENDKLIREVKVITLKSKLVSDFRKDFQFYKVREINNYHHAHDAYLNAVVGTALIKKYPKLESEFVYGDYKVYDVRKMIAKSEQEIGKATAKYFFYSNIMNFFKTEITLANGEIRKRPLIETNGETGEIVWDKGRDFATVRKVLSMPQVNIVKKTEVQTGGFSKESILPKRNSDKLIARKKDWDPKKYGGFDSPTVAYSVLVVAKVEKGKSKKLKSVKELLGITIMERSSFEKNPIDFLEAKGYKEVKKDLIIKLPKYSLFELENGRKRMLASAGELQKGNELALPSKYVNFLYLASHYEKLKGSPEDNEQKQLFVEQHKHYLDEIIEQISEFSKRVILADANLDKVLSAYNKHRDKPIREQAENIIHLFTLTNLGAPAAFKYFDTTIDRKRYTSTKEVLDATLIHQSITGLYETRIDLSQLGGDGGGGSGGGPAPGGVQEISDSRPMLHIYLNGRRFLGLLDTGADKTCIAGRDWPANWPIHQTESSLQGLGMACGVARSSQPLRWQHEDKSGIIHPFVIPTLPFTLWGRDIMKDIKVRLMTDSPDDSQDLMIGAIESNLFADQISWKSDQPVWLNQWPLKQEKLQALQQLVTEQLQLGHLEESNSPWNTPVFVIKKKSGKWRLLQDLRAVNATMHDMGALQPGLPSPPAVPKGWEIIIIDLQDCFFNIKLHPEDCKRFAFSVPSPNFKRPYQRFQWKVLPQGMKNSPTLCQKFVDKAILTVRDKYQDSYIVHYMDDILLAHPSRSIVDEILTSMIQALNKHGLVVSTEKIQKYDNLKYLGTHIQGDSVSYQKLQIRTDKLRTLNDFQKLLGNINWIRPFLKLTTGELKPLFEILNPDSNPISTRKLTPEACKALQLMNERLSTARVKRLDLSQPWSLCILKTEYTPTACLWQDGVVEWIHLPHISPKVITPYDIFCTQLIIKGRHRSKELFSKDPDYIVVPYTKVQFDLLLQEKEDWPISLLGFLGEVHFHLPKDPLLTFTLQTAIIFPHMTSTTPLEKGIVIFTDGSANGRSVTYIQGREPIIKENTQNTAQQAEIVAVITAFEEVSQPFNLYTDSKYVTGLFPEIETATLSPRTKIYTELKHLQRLIHKRQEKFYIGHIRGHTGLPGPLAQGNAYADSLTRILTAAGKRTADGSEFEKRTADGSEFESPKKKAKVE

SEQ ID NO: 6982 - protein, 2088 aa, synthetic construct
MPAAKRVKLDGGDKKYSIGLDIGTNSVGWAVITDEYKVPSKKFKVLGNTDRHSIKKNLIGALLFDSGETAEATRLKRTARRRYTRRKNRICYLQEIFSNEMAKVDDSFFHRLEESFLVEEDKKHERHPIFGNIVDEVAYHEKYPTIYHLRKKLVDSTDKADLRLIYLALAHMIKFRGHFLIEGDLNPDNSDVDKLFIQLVQTYNQLFEENPINASGVDAKAILSARLSKSRRLENLIAQLPGEKKNGLFGNLIALSLGLTPNFKSNFDLAEDAKLQLSKDTYDDDLDNLLAQIGDQYADLFLAAKNLSDAILLSDILRVNTEITKAPLSASMIKRYDEHHQDLTLLKALVRQQLPEKYKEIFFDQSKNGYAGYIDGGASQEEFYKFIKPILEKMDGTEELLVKLNREDLLRKQRTFDNGSIPHQIHLGELHAILRRQEDFYPFLKDNREKIEKILTFRIPYYVGPLARGNSRFAWMTRKSEETITPWNFEEVVDKGASAQSFIERMTNFDKNLPNEKVLPKHSLLYEYFTVYNELTKVKYVTEGMRKPAFLSGEQKKAIVDLLFKTNRKVTVKQLKEDYFKKIECFDSVEISGVEDRFNASLGTYHDLLKIIKDKDFLDNEENEDILEDIVLTLTLFEDREMIEERLKTYAHLFDDKVMKQLKRRRYTGWGRLSRKLINGIRDKQSGKTILDFLKSDGFANRNFMQLIHDDSLTFKEDIQKAQVSGQGDSLHEHIANLAGSPAIKKGILQTVKVVDELVKVMGRHKPENIVIEMARENQTTQKGQKNSRERMKRIEEGIKELGSQILKEHPVENTQLQNEKLYLYYLQNGRDMYVDQELDINRLSDYDVDHIVPQSFLKDDSIDNKVLTRSDKARGKSDNVPSEEVVKKMKNYWRQLLNAKLITQRKFDNLTKAERGGLSELDKAGFIKRQLVETRQITKHVAQILDSRMNTKYDENDKLIREVKVITLKSKLVSDFRKDFQFYKVREINNYHHAHDAYLNAVVGTALIKKYPKLESEFVYGDYKVYDVRKMIAKSEQEIGKATAKYFFYSNIMNFFKTEITLANGEIRKRPLIETNGETGEIVWDKGRDFATVRKVLSMPQVNIVKKTEVQTGGFSKESILPKRNSDKLIARKKDWDPKKYGGFDSPTVAYSVLVVAKVEKGKSKKLKSVKELLGITIMERSSFEKNPIDFLEAKGYKEVKKDLIIKLPKYSLFELENGRKRMLASAGELQKGNELALPSKYVNFLYLASHYEKLKGSPEDNEQKQLFVEQHKHYLDEIIEQISEFSKRVILADANLDKVLSAYNKHRDKPIREQAENIIHLFTLTNLGAPAAFKYFDTTIDRKRYTSTKEVLDATLIHQSITGLYETRIDLSQLGGDGGGGSGGGPAPGGTLQLDDEYRLYSPLVKPDQNIQFWLEQFPQAWAETAGMGLAKQVPPQVIQLKASATPVSVRQYPLSKEAQEGIRPHVQRLIQQGILVPVQSPWNTPLLPVRKPGTNDYRPVQDLREVNKRVQDIHPTVPNPYNLLCALPPQRSWYTVLDLKDAFFCLRLHPTSQPLFAFEWRDPGTGRTGQLTWTRLPQGFKNSPTIFDEALHRDLANFRIQHPQVTLLQYVDDLLLAGATKQDCLEGTKALLLELSDLGYRASAKKAQICRREVTYLGYSLRDGQRWLTEARKKTVVQIPAPTTAKQVREFLGTAGFCRLWIPGFATLAAPLYPLTKEKGEFSWAPEHQKAFDAIKKALLSAPALALPDVTKPFTLYVDERKGVARGVLTQTLGPWRRPVAYLSKKLDPVASGWPVCLKAIAAVAILVKDADKLTLGQNITVIAPHALENIVRQPPDRWMTNARMTHYQSLLLTERVTFAPPAALNPATLLPEETDEPVTHDCHQLLIEETGVRKDLTDIPLTGEVLTWFTDGSSYVVEGKRMAGAAVVDGTRTIWASSLPEGTSAQKAELMALTQALRLAEGKSINIYTDSRYAFATAHVHGAIYKQRGLLTSAGREIKNKEEILSLLEALHLPKRLAIIHCPGHQKAKDPISRGNQMADRVAKQAAQGVNLLAGKRTADGSEFEKRTADGSEFESPKKKAKVE

SEQ ID NO: 6983 - protein, 2085 aa, synthetic construct
MPAAKRVKLDGGDKKYSIGLDIGTNSVGWAVITDEYKVPSKKFKVLGNTDRHSIKKNLIGALLFDSGETAEATRLKRTARRRYTRRKNRICYLQEIFSNEMAKVDDSFFHRLEESFLVEEDKKHERHPIFGNIVDEVAYHEKYPTIYHLRKKLVDSTDKADLRLIYLALAHMIKFRGHFLIEGDLNPDNSDVDKLFIQLVQTYNQLFEENPINASGVDAKAILSARLSKSRRLENLIAQLPGEKKNGLFGNLIALSLGLTPNFKSNFDLAEDAKLQLSKDTYDDDLDNLLAQIGDQYADLFLAAKNLSDAILLSDILRVNTEITKAPLSASMIKRYDEHHQDLTLLKALVRQQLPEKYKEIFFDQSKNGYAGYIDGGASQEEFYKFIKPILEKMDGTEELLVKLNREDLLRKQRTFDNGSIPHQIHLGELHAILRRQEDFYPFLKDNREKIEKILTFRIPYYVGPLARGNSRFAWMTRKSEETITPWNFEEVVDKGASAQSFIERMTNFDKNLPNEKVLPKHSLLYEYFTVYNELTKVKYVTEGMRKPAFLSGEQKKAIVDLLFKTNRKVTVKQLKEDYFKKIECFDSVEISGVEDRFNASLGTYHDLLKIIKDKDFLDNEENEDILEDIVLTLTLFEDREMIEERLKTYAHLFDDKVMKQLKRRRYTGWGRLSRKLINGIRDKQSGKTILDFLKSDGFANRNFMQLIHDDSLTFKEDIQKAQVSGQGDSLHEHIANLAGSPAIKKGILQTVKVVDELVKVMGRHKPENIVIEMARENQTTQKGQKNSRERMKRIEEGIKELGSQILKEHPVENTQLQNEKLYLYYLQNGRDMYVDQELDINRLSDYDVDHIVPQSFLKDDSIDNKVLTRSDKARGKSDNVPSEEVVKKMKNYWRQLLNAKLITQRKFDNLTKAERGGLSELDKAGFIKRQLVETRQITKHVAQILDSRMNTKYDENDKLIREVKVITLKSKLVSDFRKDFQFYKVREINNYHHAHDAYLNAVVGTALIKKYPKLESEFVYGDYKVYDVRKMIAKSEQEIGKATAKYFFYSNIMNFFKTEITLANGEIRKRPLIETNGETGEIVWDKGRDFATVRKVLSMPQVNIVKKTEVQTGGFSKESILPKRNSDKLIARKKDWDPKKYGGFDSPTVAYSVLVVAKVEKGKSKKLKSVKELLGITIMERSSFEKNPIDFLEAKGYKEVKKDLIIKLPKYSLFELENGRKRMLASAGELQKGNELALPSKYVNFLYLASHYEKLKGSPEDNEQKQLFVEQHKHYLDEIIEQISEFSKRVILADANLDKVLSAYNKHRDKPIREQAENIIHLFTLTNLGAPAAFKYFDTTIDRKRYTSTKEVLDATLIHQSITGLYETRIDLSQLGGDGGGGSGGGPAPGGVPWLMKKPLQLTVLVPLHEYQERLLQQTALPKEQKELLQKLFLKYDALWQHWENQVGHRRIKPHNIATGTLAPRPQKQYPINPKAKPSIQIVIDDLLKQGVLIQQNSTMNTPVYPVPKPDGKWRMVLDYREVNKTIPLIAAQNQHSAGILSSIYRGKYKTTLDLTNGFWAHPITPESYWLTAFTWQGKQYCWTRLPQGFLNSPALFTADVVDLLKEIPNVQAYVDDIYISHDDPQEHLEQLEKIFSILLNAGYVVSLKKSEIAQREVEFLGFNITKEGRGLTDTFKQKLLNITPPKDLKQLQSILGLLNFARNFIPNYSELVKPLYTIVANANGKFISWTEDNSNQLQHIISVLNQADNLEERNPETRLIIKVNSSPSAGYIRYYNEGSKRPIMYVNYIFSKAEAKFTQTEKLLTTMHKGLIKAMDLAMGQEILVYSPIVSMTKIQRTPLPERKALPVRWITWMTYLEDPRIQFHYDKSLPELQQIPNVTEDVIAKTKHPSEFAMVFYTDGSAIKHPDVNKSHSAGMGIAQVQFIPEYKIVHQWSIPLGDHTAQLAEIAAVEFACKKALKISGPVLIVTDSFYVAESANKELPYWKSNGFLNNKKKPLRHVSKWKSIAECLQLKPDIIIMHEKGHQQPMTTLHTEGNNLADKLATQGSYVVHAGKRTADGSEFEKRTADGSEFESPKKKAKVE

SEQ ID NO: 6984 - protein, 2085 aa, synthetic construct
MPAAKRVKLDGGDKKYSIGLDIGTNSVGWAVITDEYKVPSKKFKVLGNTDRHSIKKNLIGALLFDSGETAEATRLKRTARRRYTRRKNRICYLQEIFSNEMAKVDDSFFHRLEESFLVEEDKKHERHPIFGNIVDEVAYHEKYPTIYHLRKKLVDSTDKADLRLIYLALAHMIKFRGHFLIEGDLNPDNSDVDKLFIQLVQTYNQLFEENPINASGVDAKAILSARLSKSRRLENLIAQLPGEKKNGLFGNLIALSLGLTPNFKSNFDLAEDAKLQLSKDTYDDDLDNLLAQIGDQYADLFLAAKNLSDAILLSDILRVNTEITKAPLSASMIKRYDEHHQDLTLLKALVRQQLPEKYKEIFFDQSKNGYAGYIDGGASQEEFYKFIKPILEKMDGTEELLVKLNREDLLRKQRTFDNGSIPHQIHLGELHAILRRQEDFYPFLKDNREKIEKILTFRIPYYVGPLARGNSRFAWMTRKSEETITPWNFEEVVDKGASAQSFIERMTNFDKNLPNEKVLPKHSLLYEYFTVYNELTKVKYVTEGMRKPAFLSGEQKKAIVDLLFKTNRKVTVKQLKEDYFKKIECFDSVEISGVEDRFNASLGTYHDLLKIIKDKDFLDNEENEDILEDIVLTLTLFEDREMIEERLKTYAHLFDDKVMKQLKRRRYTGWGRLSRKLINGIRDKQSGKTILDFLKSDGFANRNFMQLIHDDSLTFKEDIQKAQVSGQGDSLHEHIANLAGSPAIKKGILQTVKVVDELVKVMGRHKPENIVIEMARENQTTQKGQKNSRERMKRIEEGIKELGSQILKEHPVENTQLQNEKLYLYYLQNGRDMYVDQELDINRLSDYDVDHIVPQSFLKDDSIDNKVLTRSDKARGKSDNVPSEEVVKKMKNYWRQLLNAKLITQRKFDNLTKAERGGLSELDKAGFIKRQLVETRQITKHVAQILDSRMNTKYDENDKLIREVKVITLKSKLVSDFRKDFQFYKVREINNYHHAHDAYLNAVVGTALIKKYPKLESEFVYGDYKVYDVRKMIAKSEQEIGKATAKYFFYSNIMNFFKTEITLANGEIRKRPLIETNGETGEIVWDKGRDFATVRKVLSMPQVNIVKKTEVQTGGFSKESILPKRNSDKLIARKKDWDPKKYGGFDSPTVAYSVLVVAKVEKGKSKKLKSVKELLGITIMERSSFEKNPIDFLEAKGYKEVKKDLIIKLPKYSLFELENGRKRMLASAGELQKGNELALPSKYVNFLYLASHYEKLKGSPEDNEQKQLFVEQHKHYLDEIIEQISEFSKRVILADANLDKVLSAYNKHRDKPIREQAENIIHLFTLTNLGAPAAFKYFDTTIDRKRYTSTKEVLDATLIHQSITGLYETRIDLSQLGGDGGGGSGGGPAPGGIPWLMKKPLQLTTLVPLQEYEERLLKQTMLTGSYKEKLQSLFLKYDALWQHWENQVGHRRIKPHHIATGTVNPRPQKQYPINPKAKASIQTVINDLLKQGVLIQQNSIMNTPVYPVPKPDGKWRMVLDYREVNKTIPLIAAQNQHSAGILSSIFRGKYKTTLDLSNGFWAHSITPESYWLTAFTWLGQQYCWTRLPQGFLNSPALFNADVVDLLKEVPNVQVYVDDIYISHDDPREHLEQLEKVFSLLLNAGYVVSLKKSEIAQHEVEFLGFNITKEGRGLTETFKQKLLNITPPRDLKQLQSILGLLNFARNFIPNFSELVKPLYNIIATAPGKYITWTTDNSQQLQNIISMLNSAENLEERNPEVRLIMKVNTSPSAGYIRFYNEFAKRPIMYLNYVYTKAEVKFTNTEKLLTTIHKGLIKALDLGMGQEILVYSPIVSMTKIQKTPLPERKALPIRWITWMSYLEDPRIQFHYDKTLPELQQVPTVTDDIIAKIKHPSEFSMVFYTDGSAIKHPNVNKSHNAGMGIAQVQFKPEFTVINTWSIPLGDHTAQLAEVAAVEFACKKALKIDGPVLIVTDSFYVAESVNKELPYWQSNGFFNNKKKPLKHVSKWKSIADCIQLKPDIIIIHEKGHQPTASTFHTEGNNLADKLATQGSYVVNAGKRTADGSEFEKRTADGSEFESPKKKAKVE

SEQ ID NO: 6985 - protein, 2100 aa, synthetic construct
MPAAKRVKLDGGDKKYSIGLDIGTNSVGWAVITDEYKVPSKKFKVLGNTDRHSIKKNLIGALLFDSGETAEATRLKRTARRRYTRRKNRICYLQEIFSNEMAKVDDSFFHRLEESFLVEEDKKHERHPIFGNIVDEVAYHEKYPTIYHLRKKLVDSTDKADLRLIYLALAHMIKFRGHFLIEGDLNPDNSDVDKLFIQLVQTYNQLFEENPINASGVDAKAILSARLSKSRRLENLIAQLPGEKKNGLFGNLIALSLGLTPNFKSNFDLAEDAKLQLSKDTYDDDLDNLLAQIGDQYADLFLAAKNLSDAILLSDILRVNTEITKAPLSASMIKRYDEHHQDLTLLKALVRQQLPEKYKEIFFDQSKNGYAGYIDGGASQEEFYKFIKPILEKMDGTEELLVKLNREDLLRKQRTFDNGSIPHQIHLGELHAILRRQEDFYPFLKDNREKIEKILTFRIPYYVGPLARGNSRFAWMTRKSEETITPWNFEEVVDKGASAQSFIERMTNFDKNLPNEKVLPKHSLLYEYFTVYNELTKVKYVTEGMRKPAFLSGEQKKAIVDLLFKTNRKVTVKQLKEDYFKKIECFDSVEISGVEDRFNASLGTYHDLLKIIKDKDFLDNEENEDILEDIVLTLTLFEDREMIEERLKTYAHLFDDKVMKQLKRRRYTGWGRLSRKLINGIRDKQSGKTILDFLKSDGFANRNFMQLIHDDSLTFKEDIQKAQVSGQGDSLHEHIANLAGSPAIKKGILQTVKVVDELVKVMGRHKPENIVIEMARENQTTQKGQKNSRERMKRIEEGIKELGSQILKEHPVENTQLQNEKLYLYYLQNGRDMYVDQELDINRLSDYDVDHIVPQSFLKDDSIDNKVLTRSDKARGKSDNVPSEEVVKKMKNYWRQLLNAKLITQRKFDNLTKAERGGLSELDKAGFIKRQLVETRQITKHVAQILDSRMNTKYDENDKLIREVKVITLKSKLVSDFRKDFQFYKVREINNYHHAHDAYLNAVVGTALIKKYPKLESEFVYGDYKVYDVRKMIAKSEQEIGKATAKYFFYSNIMNFFKTEITLANGEIRKRPLIETNGETGEIVWDKGRDFATVRKVLSMPQVNIVKKTEVQTGGFSKESILPKRNSDKLIARKKDWDPKKYGGFDSPTVAYSVLVVAKVEKGKSKKLKSVKELLGITIMERSSFEKNPIDFLEAKGYKEVKKDLIIKLPKYSLFELENGRKRMLASAGELQKGNELALPSKYVNFLYLASHYEKLKGSPEDNEQKQLFVEQHKHYLDEIIEQISEFSKRVILADANLDKVLSAYNKHRDKPIREQAENIIHLFTLTNLGAPAAFKYFDTTIDRKRYTSTKEVLDATLIHQSITGLYETRIDLSQLGGDGGGGSPAPGGGGGTVSLQDEHRLFDIPVTTSLPDVWLQDFPQAWAETGGLGRAKCQAPIIIDLKPTAVPVSIKQYPMSLEAHMGIRQHIIKFLELGVLRPCRSPWNTPLLPVKKPGTQDYRPVQDLREINKRTVDIHPTVPNPYNLLSTLKPDYSWYTVLDLKDAFFCLPLAPQSQELFAFEWKDPERGISGQLTWTRLPQGFKNSPTLFNEALHRDLTDFRTQHPEVTLLQYVDDLLLAAPTKKACTQGTRHLLQELGEKGYRASAKKAQICQTKVTYLGYILSEGKRWLTPGRIETVARIPPPRNPREVREFLGTAGFCRLWIPGFAELAAPLYALTKPSTPFTWQTEHQLAFEALKKALLSAPALGLPDTSKPFTLFLDERQGIAKGVLTQKLGPWKRPVAYLSKKLDPVAAGWPPCLRIMAATAMLVKDSAKLTLGQPLTVITPHTLEAIVRQPPDRWITNARLTHYQALLLDTDRVQFGPPVTLNPATLLPVPENQPSPHDCRQVLAETHGTREDLKDQELPDADHTWYTDGSSYLDSGTRRAGAAVVDGHNTIWAQSLPPGTSAQKAELIALTKALELSKGKKANIYTDSRYAFATAHTHGSIYERRGWLTSEGKEIKNKAEIIALLKALFLPQEVAIIHCPGHQKGQDPVAVGNRQADRVARQAAMAEVLTLATEPDNTSHITAGKRTADGSEFEKRTADGSEFESPKKKAKVE

SEQ ID NO: 6986 - protein, 2092 aa, synthetic construct
MPAAKRVKLDGGDKKYSIGLDIGTNSVGWAVITDEYKVPSKKFKVLGNTDRHSIKKNLIGALLFDSGETAEATRLKRTARRRYTRRKNRICYLQEIFSNEMAKVDDSFFHRLEESFLVEEDKKHERHPIFGNIVDEVAYHEKYPTIYHLRKKLVDSTDKADLRLIYLALAHMIKFRGHFLIEGDLNPDNSDVDKLFIQLVQTYNQLFEENPINASGVDAKAILSARLSKSRRLENLIAQLPGEKKNGLFGNLIALSLGLTPNFKSNFDLAEDAKLQLSKDTYDDDLDNLLAQIGDQYADLFLAAKNLSDAILLSDILRVNTEITKAPLSASMIKRYDEHHQDLTLLKALVRQQLPEKYKEIFFDQSKNGYAGYIDGGASQEEFYKFIKPILEKMDGTEELLVKLNREDLLRKQRTFDNGSIPHQIHLGELHAILRRQEDFYPFLKDNREKIEKILTFRIPYYVGPLARGNSRFAWMTRKSEETITPWNFEEVVDKGASAQSFIERMTNFDKNLPNEKVLPKHSLLYEYFTVYNELTKVKYVTEGMRKPAFLSGEQKKAIVDLLFKTNRKVTVKQLKEDYFKKIECFDSVEISGVEDRFNASLGTYHDLLKIIKDKDFLDNEENEDILEDIVLTLTLFEDREMIEERLKTYAHLFDDKVMKQLKRRRYTGWGRLSRKLINGIRDKQSGKTILDFLKSDGFANRNFMQLIHDDSLTFKEDIQKAQVSGQGDSLHEHIANLAGSPAIKKGILQTVKVVDELVKVMGRHKPENIVIEMARENQTTQKGQKNSRERMKRIEEGIKELGSQILKEHPVENTQLQNEKLYLYYLQNGRDMYVDQELDINRLSDYDVDHIVPQSFLKDDSIDNKVLTRSDKARGKSDNVPSEEVVKKMKNYWRQLLNAKLITQRKFDNLTKAERGGLSELDKAGFIKRQLVETRQITKHVAQILDSRMNTKYDENDKLIREVKVITLKSKLVSDFRKDFQFYKVREINNYHHAHDAYLNAVVGTALIKKYPKLESEFVYGDYKVYDVRKMIAKSEQEIGKATAKYFFYSNIMNFFKTEITLANGEIRKRPLIETNGETGEIVWDKGRDFATVRKVLSMPQVNIVKKTEVQTGGFSKESILPKRNSDKLIARKKDWDPKKYGGFDSPTVAYSVLVVAKVEKGKSKKLKSVKELLGITIMERSSFEKNPIDFLEAKGYKEVKKDLIIKLPKYSLFELENGRKRMLASAGELQKGNELALPSKYVNFLYLASHYEKLKGSPEDNEQKQLFVEQHKHYLDEIIEQISEFSKRVILADANLDKVLSAYNKHRDKPIREQAENIIHLFTLTNLGAPAAFKYFDTTIDRKRYTSTKEVLDATLIHQSITGLYETRIDLSQLGGDGGGGSPAPGGGGGVLNLEEEYRLHEKPVPSSIDPSWLQLFPTVWAERAGMGLANQVPPVVVELRSGASPVAVRQYPMSKEAREGIRPHIQKFLDLGVLVPCRSPWNTPLLPVKKPGTNDYRPVQDLREINKRVQDIHPTVPNPYNLLSSLPPSYTWYSVLDLKDAFFCLRLHPNSQPLFAFEWKDPEKGNTGQLTWTRLPQGFKNSPTLFDEALHRDLAPFRALNPQVVLLQYVDDLLVAAPTYEDCKKGTQKLLQELSKLGYRVSAKKAQLCQREVTYLGYLLKEGKRWLTPARKATVMKIPVPTTPRQVREFLGTAGFCRLWIPGFASLAAPLYPLTKESIPFIWTEEHQQAFDHIKKALLSAPALALPDLTKPFTLYIDERAGVARGVLTQTLGPWRRPVAYLSKKLDPVASGWPTCLKAVAAVALLLKDADKLTLGQNVTVIASHSLESIVRQPPDRWMTNARMTHYQSLLLNERVSFAPPAVLNPATLLPVESEATPVHRCSEILAEETGTRRDLEDQPLPGVPTWYTDGSSFITEGKRRAGAPIVDGKRTVWASSLPEGTSAQKAELVALTQALRLAEGKNINIYTDSRYAFATAHIHGAIYKQRGLLTSAGKDIKNKEEILALLEAIHLPRRVAIIHCPGHQRGSNPVATGNRRADEAAKQAALSTRVLAGTTKPAGKRTADGSEFEKRTADGSEFESPKKKAKVE

SEQ ID NO: 6987 - protein, 2092 aa, synthetic construct
MPAAKRVKLDGGDKKYSIGLDIGTNSVGWAVITDEYKVPSKKFKVLGNTDRHSIKKNLIGALLFDSGETAEATRLKRTARRRYTRRKNRICYLQEIFSNEMAKVDDSFFHRLEESFLVEEDKKHERHPIFGNIVDEVAYHEKYPTIYHLRKKLVDSTDKADLRLIYLALAHMIKFRGHFLIEGDLNPDNSDVDKLFIQLVQTYNQLFEENPINASGVDAKAILSARLSKSRRLENLIAQLPGEKKNGLFGNLIALSLGLTPNFKSNFDLAEDAKLQLSKDTYDDDLDNLLAQIGDQYADLFLAAKNLSDAILLSDILRVNTEITKAPLSASMIKRYDEHHQDLTLLKALVRQQLPEKYKEIFFDQSKNGYAGYIDGGASQEEFYKFIKPILEKMDGTEELLVKLNREDLLRKQRTFDNGSIPHQIHLGELHAILRRQEDFYPFLKDNREKIEKILTFRIPYYVGPLARGNSRFAWMTRKSEETITPWNFEEVVDKGASAQSFIERMTNFDKNLPNEKVLPKHSLLYEYFTVYNELTKVKYVTEGMRKPAFLSGEQKKAIVDLLFKTNRKVTVKQLKEDYFKKIECFDSVEISGVEDRFNASLGTYHDLLKIIKDKDFLDNEENEDILEDIVLTLTLFEDREMIEERLKTYAHLFDDKVMKQLKRRRYTGWGRLSRKLINGIRDKQSGKTILDFLKSDGFANRNFMQLIHDDSLTFKEDIQKAQVSGQGDSLHEHIANLAGSPAIKKGILQTVKVVDELVKVMGRHKPENIVIEMARENQTTQKGQKNSRERMKRIEEGIKELGSQILKEHPVENTQLQNEKLYLYYLQNGRDMYVDQELDINRLSDYDVDHIVPQSFLKDDSIDNKVLTRSDKARGKSDNVPSEEVVKKMKNYWRQLLNAKLITQRKFDNLTKAERGGLSELDKAGFIKRQLVETRQITKHVAQILDSRMNTKYDENDKLIREVKVITLKSKLVSDFRKDFQFYKVREINNYHHAHDAYLNAVVGTALIKKYPKLESEFVYGDYKVYDVRKMIAKSEQEIGKATAKYFFYSNIMNFFKTEITLANGEIRKRPLIETNGETGEIVWDKGRDFATVRKVLSMPQVNIVKKTEVQTGGFSKESILPKRNSDKLIARKKDWDPKKYGGFDSPTVAYSVLVVAKVEKGKSKKLKSVKELLGITIMERSSFEKNPIDFLEAKGYKEVKKDLIIKLPKYSLFELENGRKRMLASAGELQKGNELALPSKYVNFLYLASHYEKLKGSPEDNEQKQLFVEQHKHYLDEIIEQISEFSKRVILADANLDKVLSAYNKHRDKPIREQAENIIHLFTLTNLGAPAAFKYFDTTIDRKRYTSTKEVLDATLIHQSITGLYETRIDLSQLGGDGGGGSPAPGGGGGVLNLEEEYRLHEKPVPSSIDPSWLQLFPTVWAERAGMGLANQVPPVVVELRSGASPVAVRQYPMSKEAREGIRPHIQKFLDLGVLVPCRSPWNTPLLPVKKPGTNDYRPVQDLREINKRVQDIHPTVPNPYNLLSSLPPSYTWYSVLDLKDAFFCLRLHPNSQPLFAFEWKDPEKGNTGQLTWTRLPQGFKNSPTLFNEALHRDLAPFRALNPQVVLLQYVDDLLVAAPTYEDCKKGTQKLLQELSKLGYRVSAKKAQLCQREVTYLGYLLKEGKRWLTPARKATVMKIPVPTTPRQVREFLGTAGFCRLWIPGFASLAAPLYPLTKPSIPFIWTEEHQQAFDHIKKALLSAPALALPDLTKPFTLYIDERAGVARGVLTQTLGPWRRPVAYLSKKLDPVASGWPTCLKAVAAVALLLKDADKLTLGQNVTVIASHSLESIVRQPPDRWMTNARMTHYQSLLLNERVSFAPPAVLNPATLLPVESEATPVHRCSEILAEETGTRRDLEDQPLPGVPTWYTDGSSFITEGKRRAGAPIVDGKRTVWASSLPEGTSAQKAELVALTQALRLAEGKNINIYTDSRYAFATAHIHGAIYKQRGWLTSAGKDIKNKEEILALLEAIHLPRRVAIIHCPGHQRGSNPVATGNRRADEAAKQAALSTRVLAGTTKPAGKRTADGSEFEKRTADGSEFESPKKKAKVE

SEQ ID NO: 6988 - protein, 2125 aa, synthetic construct
MPAAKRVKLDGGDKKYSIGLDIGTNSVGWAVITDEYKVPSKKFKVLGNTDRHSIKKNLIGALLFDSGETAEATRLKRTARRRYTRRKNRICYLQEIFSNEMAKVDDSFFHRLEESFLVEEDKKHERHPIFGNIVDEVAYHEKYPTIYHLRKKLVDSTDKADLRLIYLALAHMIKFRGHFLIEGDLNPDNSDVDKLFIQLVQTYNQLFEENPINASGVDAKAILSARLSKSRRLENLIAQLPGEKKNGLFGNLIALSLGLTPNFKSNFDLAEDAKLQLSKDTYDDDLDNLLAQIGDQYADLFLAAKNLSDAILLSDILRVNTEITKAPLSASMIKRYDEHHQDLTLLKALVRQQLPEKYKEIFFDQSKNGYAGYIDGGASQEEFYKFIKPILEKMDGTEELLVKLNREDLLRKQRTFDNGSIPHQIHLGELHAILRRQEDFYPFLKDNREKIEKILTFRIPYYVGPLARGNSRFAWMTRKSEETITPWNFEEVVDKGASAQSFIERMTNFDKNLPNEKVLPKHSLLYEYFTVYNELTKVKYVTEGMRKPAFLSGEQKKAIVDLLFKTNRKVTVKQLKEDYFKKIECFDSVEISGVEDRFNASLGTYHDLLKIIKDKDFLDNEENEDILEDIVLTLTLFEDREMIEERLKTYAHLFDDKVMKQLKRRRYTGWGRLSRKLINGIRDKQSGKTILDFLKSDGFANRNFMQLIHDDSLTFKEDIQKAQVSGQGDSLHEHIANLAGSPAIKKGILQTVKVVDELVKVMGRHKPENIVIEMARENQTTQKGQKNSRERMKRIEEGIKELGSQILKEHPVENTQLQNEKLYLYYLQNGRDMYVDQELDINRLSDYDVDHIVPQSFLKDDSIDNKVLTRSDKARGKSDNVPSEEVVKKMKNYWRQLLNAKLITQRKFDNLTKAERGGLSELDKAGFIKRQLVETRQITKHVAQILDSRMNTKYDENDKLIREVKVITLKSKLVSDFRKDFQFYKVREINNYHHAHDAYLNAVVGTALIKKYPKLESEFVYGDYKVYDVRKMIAKSEQEIGKATAKYFFYSNIMNFFKTEITLANGEIRKRPLIETNGETGEIVWDKGRDFATVRKVLSMPQVNIVKKTEVQTGGFSKESILPKRNSDKLIARKKDWDPKKYGGFDSPTVAYSVLVVAKVEKGKSKKLKSVKELLGITIMERSSFEKNPIDFLEAKGYKEVKKDLIIKLPKYSLFELENGRKRMLASAGELQKGNELALPSKYVNFLYLASHYEKLKGSPEDNEQKQLFVEQHKHYLDEIIEQISEFSKRVILADANLDKVLSAYNKHRDKPIREQAENIIHLFTLTNLGAPAAFKYFDTTIDRKRYTSTKEVLDATLIHQSITGLYETRIDLSQLGGDGGGGSPAPGGGGGLLGRDLLTKLKAQIQFSTEGPQVTWEDRPAMCLVLNLEEEYRLHEKPVPPSIDPSWLQLFPMVWAEKAGMGLANQVPPVVVELKSDASPVAVRQYPMSKEAREGIRPHIQRFLDLGILVPCQSPWNTPLLPVKKPGTNDYRPVQDLREVNKRVQDIHPTVPNPYNLLSSLPPSHTWYSVLDLKDAFFCLKLHPNSQPLFAFEWRDPEKGNTGQLTWTRLPQGFKNSPTLFNEALHRDLASFRALNPQVVMLQYVDDLLVAAPTYRDCKEGTRRLLQELSKLGYRVSAKKAQLCREEVTYLGYLLKGGKRWLTPARKATVMKIPTPTTPRQVREFLGTAGFCRLWIPGFASLAAPLYPLTRPKVPFTWTEAHQEAFGRIKEALLSAPALALPDLTKPFALYVDEKEGVARGVLTQTLGPWRRPVAYLSKKLDPVASGWPTCLKAIAAVALLLKDADKLTLGQNVLVIAPHNLESIVRQPPDRWMTNARMTHYQSLLLNERVSFAPPAILNPATLLPVESDDTPIHICSEILAEETGTRPDLRDQPLPGVPAWYTDGSSFIMDGRRQAGAAIVDNKRTVWASNLPEGTSAQKAELIALTQALRLAEGKSINIYTDSRYAFATAHVHGAIYKQRGWLTSAGKDIKNKEEILALLEAIHLPKRVAIIHCPGHQRGTDPVATGNRKADEAAKQAAQSTRILTETTKNAGKRTADGSEFEKRTADGSEFESPKKKAKVE

SEQ ID NO: 6989 - protein, 2216 aa, synthetic construct
MPAAKRVKLDGGDKKYSIGLDIGTNSVGWAVITDEYKVPSKKFKVLGNTDRHSIKKNLIGALLFDSGETAEATRLKRTARRRYTRRKNRICYLQEIFSNEMAKVDDSFFHRLEESFLVEEDKKHERHPIFGNIVDEVAYHEKYPTIYHLRKKLVDSTDKADLRLIYLALAHMIKFRGHFLIEGDLNPDNSDVDKLFIQLVQTYNQLFEENPINASGVDAKAILSARLSKSRRLENLIAQLPGEKKNGLFGNLIALSLGLTPNFKSNFDLAEDAKLQLSKDTYDDDLDNLLAQIGDQYADLFLAAKNLSDAILLSDILRVNTEITKAPLSASMIKRYDEHHQDLTLLKALVRQQLPEKYKEIFFDQSKNGYAGYIDGGASQEEFYKFIKPILEKMDGTEELLVKLNREDLLRKQRTFDNGSIPHQIHLGELHAILRRQEDFYPFLKDNREKIEKILTFRIPYYVGPLARGNSRFAWMTRKSEETITPWNFEEVVDKGASAQSFIERMTNFDKNLPNEKVLPKHSLLYEYFTVYNELTKVKYVTEGMRKPAFLSGEQKKAIVDLLFKTNRKVTVKQLKEDYFKKIECFDSVEISGVEDRFNASLGTYHDLLKIIKDKDFLDNEENEDILEDIVLTLTLFEDREMIEERLKTYAHLFDDKVMKQLKRRRYTGWGRLSRKLINGIRDKQSGKTILDFLKSDGFANRNFMQLIHDDSLTFKEDIQKAQVSGQGDSLHEHIANLAGSPAIKKGILQTVKVVDELVKVMGRHKPENIVIEMARENQTTQKGQKNSRERMKRIEEGIKELGSQILKEHPVENTQLQNEKLYLYYLQNGRDMYVDQELDINRLSDYDVDHIVPQSFLKDDSIDNKVLTRSDKARGKSDNVPSEEVVKKMKNYWRQLLNAKLITQRKFDNLTKAERGGLSELDKAGFIKRQLVETRQITKHVAQILDSRMNTKYDENDKLIREVKVITLKSKLVSDFRKDFQFYKVREINNYHHAHDAYLNAVVGTALIKKYPKLESEFVYGDYKVYDVRKMIAKSEQEIGKATAKYFFYSNIMNFFKTEITLANGEIRKRPLIETNGETGEIVWDKGRDFATVRKVLSMPQVNIVKKTEVQTGGFSKESILPKRNSDKLIARKKDWDPKKYGGFDSPTVAYSVLVVAKVEKGKSKKLKSVKELLGITIMERSSFEKNPIDFLEAKGYKEVKKDLIIKLPKYSLFELENGRKRMLASAGELQKGNELALPSKYVNFLYLASHYEKLKGSPEDNEQKQLFVEQHKHYLDEIIEQISEFSKRVILADANLDKVLSAYNKHRDKPIREQAENIIHLFTLTNLGAPAAFKYFDTTIDRKRYTSTKEVLDATLIHQSITGLYETRIDLSQLGGDGGGGSPAPGGGGGTLGDQGSRGSDPLPEPRVTLTVEGIPTEFLVNTGAEHSVLTKPMGKMGSKRTVVAGATGSKVYPWTTKRLLKIGQKQVTHSFLVIPECPAPLLGRDLLTKLKAQIQFSTEGPQVTWEDRPAMCLVLNLEEEYRLHEKPVPPSIDPSWLQLFPMVWAEKAGMGLANQVPPVVVELKSDASPVAVRQYPMSKEAREGIRPHIQRFLDLGILVPCQSPWNTPLLPVKKPGTNDYRPVQDLREVNKRVQDIHPTVPNPYNLLSSLPPSHTWYSVLDLKDAFFCLKLHPNSQPLFAFEWRDPEKGNTGQLTWTRLPQGFKNSPTLFNEALHRDLASFRALNPQVVMLQYVDDLLVAAPTYRDCKEGTRRLLQELSKLGYRVSAKKAQLCREEVTYLGYLLKGGKRWLTPARKATVMKIPTPTTPRQVREFLGTAGFCRLWIPGFASLAAPLYPLTRPKVPFTWTEAHQEAFGRIKEALLSAPALALPDLTKPFALYVDEKEGVARGVLTQTLGPWRRPVAYLSKKLDPVASGWPTCLKAIAAVALLLKDADKLTLGQNVLVIAPHNLESIVRQPPDRWMTNARMTHYQSLLLNERVSFAPPAILNPATLLPVESDDTPIHICSEILAEETGTRPDLRDQPLPGVPAWYTDGSSFIMDGRRQAGAAIVDNKRTVWASNLPEGTSAQKAELIALTQALRLAEGKSINIYTDSRYAFATAHVHGAIYKQRGWLTSAGKDIKNKEEILALLEAIHLPKRVAIIHCPGHQRGTDPVATGNRKADEAAKQAAQSTRILTETTKNAGKRTADGSEFEKRTADGSEFESPKKKAKVE

SEQ ID NO: 6990 - protein, 2088 aa, synthetic construct
MPAAKRVKLDGGDKKYSIGLDIGTNSVGWAVITDEYKVPSKKFKVLGNTDRHSIKKNLIGALLFDSGETAEATRLKRTARRRYTRRKNRICYLQEIFSNEMAKVDDSFFHRLEESFLVEEDKKHERHPIFGNIVDEVAYHEKYPTIYHLRKKLVDSTDKADLRLIYLALAHMIKFRGHFLIEGDLNPDNSDVDKLFIQLVQTYNQLFEENPINASGVDAKAILSARLSKSRRLENLIAQLPGEKKNGLFGNLIALSLGLTPNFKSNFDLAEDAKLQLSKDTYDDDLDNLLAQIGDQYADLFLAAKNLSDAILLSDILRVNTEITKAPLSASMIKRYDEHHQDLTLLKALVRQQLPEKYKEIFFDQSKNGYAGYIDGGASQEEFYKFIKPILEKMDGTEELLVKLNREDLLRKQRTFDNGSIPHQIHLGELHAILRRQEDFYPFLKDNREKIEKILTFRIPYYVGPLARGNSRFAWMTRKSEETITPWNFEEVVDKGASAQSFIERMTNFDKNLPNEKVLPKHSLLYEYFTVYNELTKVKYVTEGMRKPAFLSGEQKKAIVDLLFKTNRKVTVKQLKEDYFKKIECFDSVEISGVEDRFNASLGTYHDLLKIIKDKDFLDNEENEDILEDIVLTLTLFEDREMIEERLKTYAHLFDDKVMKQLKRRRYTGWGRLSRKLINGIRDKQSGKTILDFLKSDGFANRNFMQLIHDDSLTFKEDIQKAQVSGQGDSLHEHIANLAGSPAIKKGILQTVKVVDELVKVMGRHKPENIVIEMARENQTTQKGQKNSRERMKRIEEGIKELGSQILKEHPVENTQLQNEKLYLYYLQNGRDMYVDQELDINRLSDYDVDHIVPQSFLKDDSIDNKVLTRSDKARGKSDNVPSEEVVKKMKNYWRQLLNAKLITQRKFDNLTKAERGGLSELDKAGFIKRQLVETRQITKHVAQILDSRMNTKYDENDKLIREVKVITLKSKLVSDFRKDFQFYKVREINNYHHAHDAYLNAVVGTALIKKYPKLESEFVYGDYKVYDVRKMIAKSEQEIGKATAKYFFYSNIMNFFKTEITLANGEIRKRPLIETNGETGEIVWDKGRDFATVRKVLSMPQVNIVKKTEVQTGGFSKESILPKRNSDKLIARKKDWDPKKYGGFDSPTVAYSVLVVAKVEKGKSKKLKSVKELLGITIMERSSFEKNPIDFLEAKGYKEVKKDLIIKLPKYSLFELENGRKRMLASAGELQKGNELALPSKYVNFLYLASHYEKLKGSPEDNEQKQLFVEQHKHYLDEIIEQISEFSKRVILADANLDKVLSAYNKHRDKPIREQAENIIHLFTLTNLGAPAAFKYFDTTIDRKRYTSTKEVLDATLIHQSITGLYETRIDLSQLGGDGGGGSPAPGGGGGTLQLDDEYRLYSPLVKPDQNIQFWLEQFPQAWAETAGMGLAKQVPPQVIQLKASATPVSVRQYPLSKEAQEGIRPHVQRLIQQGILVPVQSPWNTPLLPVRKPGTNDYRPVQDLREVNKRVQDIHPTVPNPYNLLCALPPQRSWYTVLDLKDAFFCLRLHPTSQPLFAFEWRDPGTGRTGQLTWTRLPQGFKNSPTIFDEALHRDLANFRIQHPQVTLLQYVDDLLLAGATKQDCLEGTKALLLELSDLGYRASAKKAQICRREVTYLGYSLRDGQRWLTEARKKTVVQIPAPTTAKQVREFLGTAGFCRLWIPGFATLAAPLYPLTKEKGEFSWAPEHQKAFDAIKKALLSAPALALPDVTKPFTLYVDERKGVARGVLTQTLGPWRRPVAYLSKKLDPVASGWPVCLKAIAAVAILVKDADKLTLGQNITVIAPHALENIVRQPPDRWMTNARMTHYQSLLLTERVTFAPPAALNPATLLPEETDEPVTHDCHQLLIEETGVRKDLTDIPLTGEVLTWFTDGSSYVVEGKRMAGAAVVDGTRTIWASSLPEGTSAQKAELMALTQALRLAEGKSINIYTDSRYAFATAHVHGAIYKQRGLLTSAGREIKNKEEILSLLEALHLPKRLAIIHCPGHQKAKDPISRGNQMADRVAKQAAQGVNLLAGKRTADGSEFEKRTADGSEFESPKKKAKVE

SEQ ID NO: 6991 - protein, 2174 aa, synthetic construct
MPAAKRVKLDGGDKKYSIGLDIGTNSVGWAVITDEYKVPSKKFKVLGNTDRHSIKKNLIGALLFDSGETAEATRLKRTARRRYTRRKNRICYLQEIFSNEMAKVDDSFFHRLEESFLVEEDKKHERHPIFGNIVDEVAYHEKYPTIYHLRKKLVDSTDKADLRLIYLALAHMIKFRGHFLIEGDLNPDNSDVDKLFIQLVQTYNQLFEENPINASGVDAKAILSARLSKSRRLENLIAQLPGEKKNGLFGNLIALSLGLTPNFKSNFDLAEDAKLQLSKDTYDDDLDNLLAQIGDQYADLFLAAKNLSDAILLSDILRVNTEITKAPLSASMIKRYDEHHQDLTLLKALVRQQLPEKYKEIFFDQSKNGYAGYIDGGASQEEFYKFIKPILEKMDGTEELLVKLNREDLLRKQRTFDNGSIPHQIHLGELHAILRRQEDFYPFLKDNREKIEKILTFRIPYYVGPLARGNSRFAWMTRKSEETITPWNFEEVVDKGASAQSFIERMTNFDKNLPNEKVLPKHSLLYEYFTVYNELTKVKYVTEGMRKPAFLSGEQKKAIVDLLFKTNRKVTVKQLKEDYFKKIECFDSVEISGVEDRFNASLGTYHDLLKIIKDKDFLDNEENEDILEDIVLTLTLFEDREMIEERLKTYAHLFDDKVMKQLKRRRYTGWGRLSRKLINGIRDKQSGKTILDFLKSDGFANRNFMQLIHDDSLTFKEDIQKAQVSGQGDSLHEHIANLAGSPAIKKGILQTVKVVDELVKVMGRHKPENIVIEMARENQTTQKGQKNSRERMKRIEEGIKELGSQILKEHPVENTQLQNEKLYLYYLQNGRDMYVDQELDINRLSDYDVDHIVPQSFLKDDSIDNKVLTRSDKARGKSDNVPSEEVVKKMKNYWRQLLNAKLITQRKFDNLTKAERGGLSELDKAGFIKRQLVETRQITKHVAQILDSRMNTKYDENDKLIREVKVITLKSKLVSDFRKDFQFYKVREINNYHHAHDAYLNAVVGTALIKKYPKLESEFVYGDYKVYDVRKMIAKSEQEIGKATAKYFFYSNIMNFFKTEITLANGEIRKRPLIETNGETGEIVWDKGRDFATVRKVLSMPQVNIVKKTEVQTGGFSKESILPKRNSDKLIARKKDWDPKKYGGFDSPTVAYSVLVVAKVEKGKSKKLKSVKELLGITIMERSSFEKNPIDFLEAKGYKEVKKDLIIKLPKYSLFELENGRKRMLASAGELQKGNELALPSKYVNFLYLASHYEKLKGSPEDNEQKQLFVEQHKHYLDEIIEQISEFSKRVILADANLDKVLSAYNKHRDKPIREQAENIIHLFTLTNLGAPAAFKYFDTTIDRKRYTSTKEVLDATLIHQSITGLYETRIDLSQLGGDGGGGSPAPGGGGGMDPLQLLQPLEAEIKGTKLKAHWNSGATITCVPEAFLEDERPIQTMLIKTIHGEKQQDVYYLTFKVQGRKVEAEVLASPYDYILLNPSDVPWLMKKPLQLTVLVPLHEYQERLLQQTALPKEQKELLQKLFLKYDALWQHWENQVGHRRIKPHNIATGTLAPRPQKQYPINPKAKPSIQIVIDDLLKQGVLIQQNSTMNTPVYPVPKPDGKWRMVLDYREVNKTIPLIAAQNQHSAGILSSIYRGKYKTTLDLTNGFWAHPITPESYWLTAFTWQGKQYCWTRLPQGFLNSPALFNADVVDLLKEIPNVQAYVDDIYISHDDPQEHLEQLEKIFSILLNAGYVVSLKKSEIAQREVEFLGFNITKEGRGLTDTFKQKLLNITPPKDLKQLQSILGLLNFARNFIPNYSELVKPLYTIVAPANGKFISWTEDNSNQLQHIISVLNQADNLEERNPETRLIIKVNSSPSAGYIRYYNEGSKRPIMYVNYIFSKAEAKFTQTEKLLTTMHKGLIKAMDLAMGQEILVYSPIVSMTKIQRTPLPERKALPVRWITWMTYLEDPRIQFHYDKSLPELQQIPNVTEDVIAKTKHPSEFAMVFYTDGSAIKHPDVNKSHSAGMGIAQVQFIPEYKIVHQWSIPLGDHTAQLAEIAAVEFACKKALKISGPVLIVTDSFYVAESANKELPYWKSNGFLNNKKKPLRHVSKWKSIAECLQLKPDIIIMHEKGHQQPMTTLHTEGNNLADKLATQGSYVVHAGKRTADGSEFEKRTADGSEFESPKKKAKVE

SEQ ID NO: 6992 - protein, 2092 aa, synthetic construct
MPAAKRVKLDGGDKKYSIGLDIGTNSVGWAVITDEYKVPSKKFKVLGNTDRHSIKKNLIGALLFDSGETAEATRLKRTARRRYTRRKNRICYLQEIFSNEMAKVDDSFFHRLEESFLVEEDKKHERHPIFGNIVDEVAYHEKYPTIYHLRKKLVDSTDKADLRLIYLALAHMIKFRGHFLIEGDLNPDNSDVDKLFIQLVQTYNQLFEENPINASGVDAKAILSARLSKSRRLENLIAQLPGEKKNGLFGNLIALSLGLTPNFKSNFDLAEDAKLQLSKDTYDDDLDNLLAQIGDQYADLFLAAKNLSDAILLSDILRVNTEITKAPLSASMIKRYDEHHQDLTLLKALVRQQLPEKYKEIFFDQSKNGYAGYIDGGASQEEFYKFIKPILEKMDGTEELLVKLNREDLLRKQRTFDNGSIPHQIHLGELHAILRRQEDFYPFLKDNREKIEKILTFRIPYYVGPLARGNSRFAWMTRKSEETITPWNFEEVVDKGASAQSFIERMTNFDKNLPNEKVLPKHSLLYEYFTVYNELTKVKYVTEGMRKPAFLSGEQKKAIVDLLFKTNRKVTVKQLKEDYFKKIECFDSVEISGVEDRFNASLGTYHDLLKIIKDKDFLDNEENEDILEDIVLTLTLFEDREMIEERLKTYAHLFDDKVMKQLKRRRYTGWGRLSRKLINGIRDKQSGKTILDFLKSDGFANRNFMQLIHDDSLTFKEDIQKAQVSGQGDSLHEHIANLAGSPAIKKGILQTVKVVDELVKVMGRHKPENIVIEMARENQTTQKGQKNSRERMKRIEEGIKELGSQILKEHPVENTQLQNEKLYLYYLQNGRDMYVDQELDINRLSDYDVDHIVPQSFLKDDSIDNKVLTRSDKARGKSDNVPSEEVVKKMKNYWRQLLNAKLITQRKFDNLTKAERGGLSELDKAGFIKRQLVETRQITKHVAQILDSRMNTKYDENDKLIREVKVITLKSKLVSDFRKDFQFYKVREINNYHHAHDAYLNAVVGTALIKKYPKLESEFVYGDYKVYDVRKMIAKSEQEIGKATAKYFFYSNIMNFFKTEITLANGEIRKRPLIETNGETGEIVWDKGRDFATVRKVLSMPQVNIVKKTEVQTGGFSKESILPKRNSDKLIARKKDWDPKKYGGFDSPTVAYSVLVVAKVEKGKSKKLKSVKELLGITIMERSSFEKNPIDFLEAKGYKEVKKDLIIKLPKYSLFELENGRKRMLASAGELQKGNELALPSKYVNFLYLASHYEKLKGSPEDNEQKQLFVEQHKHYLDEIIEQISEFSKRVILADANLDKVLSAYNKHRDKPIREQAENIIHLFTLTNLGAPAAFKYFDTTIDRKRYTSTKEVLDATLIHQSITGLYETRIDLSQLGGDGGGGSPAPGGGGGVLNLEEEYRLHEKPVPSSIDPSWLQLFPTVWAERAGMGLANQVPPVVVELRSGASPVAVRQYPMSKEAREGIRPHIQRFLDLGVLVPCQSPWNTPLLPVKKPGTNDYRPVQDLREINKRVQDIHPTVPNPYNLLSSLPPSHTWYSVLDLKDAFFCLKLHPNSQPLFAFEWRDPEKGNTGQLTWTRLPQGFKNSPTLFDEALHRDLAPFRALNPQVVLLQYVDDLLVAAPTYRDCKEGTQKLLQELSKLGYRVSAKKAQLCQKEVTYLGYLLKEGKRWLTPARKATVMKIPPPTTPRQVREFLGTAGFCRLWIPGFASLAAPLYPLTKESIPFIWTEEHQKAFDRIKEALLSAPALALPDLTKPFTLYVDERAGVARGVLTQTLGPWRRPVAYLSKKLDPVASGWPTCLKAVAAVALLLKDADKLTLGQNVTVIASHSLESIVRQPPDRWMTNARMTHYQSLLLNERVSFAPPAVLNPATLLPVESEATPVHRCSEILAEETGTRRDLKDQPLPGVPAWYTDGSSFIAEGKRRAGAAIVDGKRTVWASSLPEGTSAQKAELVALTQALRLAEGKDINIYTDSRYAFATAHIHGAIYKQRGLLTSAGKDIKNKEEILALLEAIHLPKRVAIIHCPGHQKGNDPVATGNRRADEAAKQAALSTRVLAETTKPAGKRTADGSEFEKRTADGSEFESPKKKAKVE

SEQ ID NO: 6993 - protein, 2100 aa, synthetic construct
MPAAKRVKLDGGDKKYSIGLDIGTNSVGWAVITDEYKVPSKKFKVLGNTDRHSIKKNLIGALLFDSGETAEATRLKRTARRRYTRRKNRICYLQEIFSNEMAKVDDSFFHRLEESFLVEEDKKHERHPIFGNIVDEVAYHEKYPTIYHLRKKLVDSTDKADLRLIYLALAHMIKFRGHFLIEGDLNPDNSDVDKLFIQLVQTYNQLFEENPINASGVDAKAILSARLSKSRRLENLIAQLPGEKKNGLFGNLIALSLGLTPNFKSNFDLAEDAKLQLSKDTYDDDLDNLLAQIGDQYADLFLAAKNLSDAILLSDILRVNTEITKAPLSASMIKRYDEHHQDLTLLKALVRQQLPEKYKEIFFDQSKNGYAGYIDGGASQEEFYKFIKPILEKMDGTEELLVKLNREDLLRKQRTFDNGSIPHQIHLGELHAILRRQEDFYPFLKDNREKIEKILTFRIPYYVGPLARGNSRFAWMTRKSEETITPWNFEEVVDKGASAQSFIERMTNFDKNLPNEKVLPKHSLLYEYFTVYNELTKVKYVTEGMRKPAFLSGEQKKAIVDLLFKTNRKVTVKQLKEDYFKKIECFDSVEISGVEDRFNASLGTYHDLLKIIKDKDFLDNEENEDILEDIVLTLTLFEDREMIEERLKTYAHLFDDKVMKQLKRRRYTGWGRLSRKLINGIRDKQSGKTILDFLKSDGFANRNFMQLIHDDSLTFKEDIQKAQVSGQGDSLHEHIANLAGSPAIKKGILQTVKVVDELVKVMGRHKPENIVIEMARENQTTQKGQKNSRERMKRIEEGIKELGSQILKEHPVENTQLQNEKLYLYYLQNGRDMYVDQELDINRLSDYDVDHIVPQSFLKDDSIDNKVLTRSDKARGKSDNVPSEEVVKKMKNYWRQLLNAKLITQRKFDNLTKAERGGLSELDKAGFIKRQLVETRQITKHVAQILDSRMNTKYDENDKLIREVKVITLKSKLVSDFRKDFQFYKVREINNYHHAHDAYLNAVVGTALIKKYPKLESEFVYGDYKVYDVRKMIAKSEQEIGKATAKYFFYSNIMNFFKTEITLANGEIRKRPLIETNGETGEIVWDKGRDFATVRKVLSMPQVNIVKKTEVQTGGFSKESILPKRNSDKLIARKKDWDPKKYGGFDSPTVAYSVLVVAKVEKGKSKKLKSVKELLGITIMERSSFEKNPIDFLEAKGYKEVKKDLIIKLPKYSLFELENGRKRMLASAGELQKGNELALPSKYVNFLYLASHYEKLKGSPEDNEQKQLFVEQHKHYLDEIIEQISEFSKRVILADANLDKVLSAYNKHRDKPIREQAENIIHLFTLTNLGAPAAFKYFDTTIDRKRYTSTKEVLDATLIHQSITGLYETRIDLSQLGGDGGGGGGGSPAPGGTVSLQDEHRLFDIPVTTSLPDVWLQDFPQAWAETGGLGRAKCQAPIIIDLKPTAVPVSIKQYPMSLEAHMGIRQHIIKFLELGVLRPCRSPWNTPLLPVKKPGTQDYRPVQDLREINKRTVDIHPTVPNPYNLLSTLKPDYSWYTVLDLKDAFFCLPLAPQSQELFAFEWKDPERGISGQLTWTRLPQGFKNSPTLFNEALHRDLTDFRTQHPEVTLLQYVDDLLLAAPTKKACTQGTRHLLQELGEKGYRASAKKAQICQTKVTYLGYILSEGKRWLTPGRIETVARIPPPRNPREVREFLGTAGFCRLWIPGFAELAAPLYALTKPSTPFTWQTEHQLAFEALKKALLSAPALGLPDTSKPFTLFLDERQGIAKGVLTQKLGPWKRPVAYLSKKLDPVAAGWPPCLRIMAATAMLVKDSAKLTLGQPLTVITPHTLEAIVRQPPDRWITNARLTHYQALLLDTDRVQFGPPVTLNPATLLPVPENQPSPHDCRQVLAETHGTREDLKDQELPDADHTWYTDGSSYLDSGTRRAGAAVVDGHNTIWAQSLPPGTSAQKAELIALTKALELSKGKKANIYTDSRYAFATAHTHGSIYERRGWLTSEGKEIKNKAEIIALLKALFLPQEVAIIHCPGHQKGQDPVAVGNRQADRVARQAAMAEVLTLATEPDNTSHITAGKRTADGSEFEKRTADGSEFESPKKKAKVE

SEQ ID NO: 6994 - protein, 2171 aa, synthetic construct
MPAAKRVKLDGGDKKYSIGLDIGTNSVGWAVITDEYKVPSKKFKVLGNTDRHSIKKNLIGALLFDSGETAEATRLKRTARRRYTRRKNRICYLQEIFSNEMAKVDDSFFHRLEESFLVEEDKKHERHPIFGNIVDEVAYHEKYPTIYHLRKKLVDSTDKADLRLIYLALAHMIKFRGHFLIEGDLNPDNSDVDKLFIQLVQTYNQLFEENPINASGVDAKAILSARLSKSRRLENLIAQLPGEKKNGLFGNLIALSLGLTPNFKSNFDLAEDAKLQLSKDTYDDDLDNLLAQIGDQYADLFLAAKNLSDAILLSDILRVNTEITKAPLSASMIKRYDEHHQDLTLLKALVRQQLPEKYKEIFFDQSKNGYAGYIDGGASQEEFYKFIKPILEKMDGTEELLVKLNREDLLRKQRTFDNGSIPHQIHLGELHAILRRQEDFYPFLKDNREKIEKILTFRIPYYVGPLARGNSRFAWMTRKSEETITPWNFEEVVDKGASAQSFIERMTNFDKNLPNEKVLPKHSLLYEYFTVYNELTKVKYVTEGMRKPAFLSGEQKKAIVDLLFKTNRKVTVKQLKEDYFKKIECFDSVEISGVEDRFNASLGTYHDLLKIIKDKDFLDNEENEDILEDIVLTLTLFEDREMIEERLKTYAHLFDDKVMKQLKRRRYTGWGRLSRKLINGIRDKQSGKTILDFLKSDGFANRNFMQLIHDDSLTFKEDIQKAQVSGQGDSLHEHIANLAGSPAIKKGILQTVKVVDELVKVMGRHKPENIVIEMARENQTTQKGQKNSRERMKRIEEGIKELGSQILKEHPVENTQLQNEKLYLYYLQNGRDMYVDQELDINRLSDYDVDHIVPQSFLKDDSIDNKVLTRSDKARGKSDNVPSEEVVKKMKNYWRQLLNAKLITQRKFDNLTKAERGGLSELDKAGFIKRQLVETRQITKHVAQILDSRMNTKYDENDKLIREVKVITLKSKLVSDFRKDFQFYKVREINNYHHAHDAYLNAVVGTALIKKYPKLESEFVYGDYKVYDVRKMIAKSEQEIGKATAKYFFYSNIMNFFKTEITLANGEIRKRPLIETNGETGEIVWDKGRDFATVRKVLSMPQVNIVKKTEVQTGGFSKESILPKRNSDKLIARKKDWDPKKYGGFDSPTVAYSVLVVAKVEKGKSKKLKSVKELLGITIMERSSFEKNPIDFLEAKGYKEVKKDLIIKLPKYSLFELENGRKRMLASAGELQKGNELALPSKYVNFLYLASHYEKLKGSPEDNEQKQLFVEQHKHYLDEIIEQISEFSKRVILADANLDKVLSAYNKHRDKPIREQAENIIHLFTLTNLGAPAAFKYFDTTIDRKRYTSTKEVLDATLIHQSITGLYETRIDLSQLGGDGGGGGGGSPAPGGMDLLKPLTVERKGVKIKGYWNSQADITCVPKDLLQGEEPVRQQNVTTIHGTQEGDVYYVNLKIDGRRINTEVIGTTLDYAIITPGDVPWILKKPLELTIKLDLEEQQGTLLNNSILSKKGKEELKQLFEKYSALWQSWENQVGHRRIRPHKIATGTVKPTPQKQYHINPKAKPDIQIVINDLLKQGVLIQKESTMNTPVYPVPKPNGRWRMVLDYRAVNKVTPLIAVQNQHSYGILGSLFKGRYKTTIDLSNGFWAHPIVPEDYWITAFTWQGKQYCWTVLPQGFLNSPGLFTGDVVDLLQGIPNVEVYVDDVYISHDSEKEHLEYLDILFNRLKEAGYIISLKKSNIANSIVDFLGFQITNEGRGLTDTFKEKLENITAPTTLKQLQSILGLLNFARNFIPDFTELIAPLYALIPKSTKNYVPWQIEHSTTLETLITKLNGAEYLQGRKGDKTLIMKVNASYTTGYIRYYNEGEKKPISYVSIVFSKTELKFTELEKLLTTVHKGLLKALDLSMGQNIHVYSPIVSMQNIQKTPQTAKKALASRWLSWLSYLEDPRIRFFYDPQMPALKDLPAVDTGKDNKKHPSNFQHIFYTDGSAITSPTKEGHLNAGMGIVYFINKDGNLQKQQEWSISLGNHTAQFAEIAAFEFALKKCLPLGGNILVVTDSNYVAKAYNEELDVWASNGFVNNRKKPLKHISKWKSVADLKRLRPDVVVTHEPGHQKLDSSPHAYGNNLADQLATQASFKVHAGKRTADGSEFEKRTADGSEFESPKKKAKVE

SEQ ID NO: 6995 - protein, 2093 aa, synthetic construct
MPAAKRVKLDGGDKKYSIGLDIGTNSVGWAVITDEYKVPSKKFKVLGNTDRHSIKKNLIGALLFDSGETAEATRLKRTARRRYTRRKNRICYLQEIFSNEMAKVDDSFFHRLEESFLVEEDKKHERHPIFGNIVDEVAYHEKYPTIYHLRKKLVDSTDKADLRLIYLALAHMIKFRGHFLIEGDLNPDNSDVDKLFIQLVQTYNQLFEENPINASGVDAKAILSARLSKSRRLENLIAQLPGEKKNGLFGNLIALSLGLTPNFKSNFDLAEDAKLQLSKDTYDDDLDNLLAQIGDQYADLFLAAKNLSDAILLSDILRVNTEITKAPLSASMIKRYDEHHQDLTLLKALVRQQLPEKYKEIFFDQSKNGYAGYIDGGASQEEFYKFIKPILEKMDGTEELLVKLNREDLLRKQRTFDNGSIPHQIHLGELHAILRRQEDFYPFLKDNREKIEKILTFRIPYYVGPLARGNSRFAWMTRKSEETITPWNFEEVVDKGASAQSFIERMTNFDKNLPNEKVLPKHSLLYEYFTVYNELTKVKYVTEGMRKPAFLSGEQKKAIVDLLFKTNRKVTVKQLKEDYFKKIECFDSVEISGVEDRFNASLGTYHDLLKIIKDKDFLDNEENEDILEDIVLTLTLFEDREMIEERLKTYAHLFDDKVMKQLKRRRYTGWGRLSRKLINGIRDKQSGKTILDFLKSDGFANRNFMQLIHDDSLTFKEDIQKAQVSGQGDSLHEHIANLAGSPAIKKGILQTVKVVDELVKVMGRHKPENIVIEMARENQTTQKGQKNSRERMKRIEEGIKELGSQILKEHPVENTQLQNEKLYLYYLQNGRDMYVDQELDINRLSDYDVDHIVPQSFLKDDSIDNKVLTRSDKARGKSDNVPSEEVVKKMKNYWRQLLNAKLITQRKFDNLTKAERGGLSELDKAGFIKRQLVETRQITKHVAQILDSRMNTKYDENDKLIREVKVITLKSKLVSDFRKDFQFYKVREINNYHHAHDAYLNAVVGTALIKKYPKLESEFVYGDYKVYDVRKMIAKSEQEIGKATAKYFFYSNIMNFFKTEITLANGEIRKRPLIETNGETGEIVWDKGRDFATVRKVLSMPQVNIVKKTEVQTGGFSKESILPKRNSDKLIARKKDWDPKKYGGFDSPTVAYSVLVVAKVEKGKSKKLKSVKELLGITIMERSSFEKNPIDFLEAKGYKEVKKDLIIKLPKYSLFELENGRKRMLASAGELQKGNELALPSKYVNFLYLASHYEKLKGSPEDNEQKQLFVEQHKHYLDEIIEQISEFSKRVILADANLDKVLSAYNKHRDKPIREQAENIIHLFTLTNLGAPAAFKYFDTTIDRKRYTSTKEVLDATLIHQSITGLYETRIDLSQLGGDGGGGGGGSPAPGGTLQLEEEYRLFEPESTQKQEMDIWLKNFPQAWAETGGMGTAHCQAPVLIQLKATATPISIRQYPMPHEAYQGIKPHIRRMLDQGILKPCQSPWNTPLLPVKKPGTEDYRPVQDLREVNKRVEDIHPTVPNPYNLLSTLPPSHPWYTVLDLKDAFFCLRLHSESQLLFAFEWRDPEIGLSGQLTWTRLPQGFKNSPTLFDEALHSDLADFRVRYPALVLLQYVDDLLLAAATRTECLEGTKALLETLGNKGYRASAKKAQICLQEVTYLGYSLKDGQRWLTKARKEAILSIPVPKNSRQVREFLGTAGYCRLWIPGFAELAAPLYPLTRPGTLFQWGTEQQLAFEDIKKALLSSPALGLPDITKPFELFIDENSGFAKGVLVQKLGPWKRPVAYLSKKLDTVASGWPPCLRMVAAIAILVKDAGKLTLGQPLTILTSHPVEALVRQPPNKWLSNARMTHYQAMLLDAERVHFGPTVSLNPATLLPLPSGGNHHDCLQILAETHGTRPDLTDQPLPDADLTWYTDGSSFIRNGEREAGAAVTTESEVIWAAPLPPGTSAQRAELIALTQALKMAEGKKLTVYTDSRYAFATTHVHGEIYRRRGLLTSEGKEIKNKNEILALLEALFLPKRLSIIHCPGHQKGDSPQAKGNRLADDTAKKAATETHSSLTVLPAGKRTADGSEFEKRTADGSEFESPKKKAKVE

SEQ ID NO: 6996 - protein, 2085 aa, synthetic construct
MPAAKRVKLDGGDKKYSIGLDIGTNSVGWAVITDEYKVPSKKFKVLGNTDRHSIKKNLIGALLFDSGETAEATRLKRTARRRYTRRKNRICYLQEIFSNEMAKVDDSFFHRLEESFLVEEDKKHERHPIFGNIVDEVAYHEKYPTIYHLRKKLVDSTDKADLRLIYLALAHMIKFRGHFLIEGDLNPDNSDVDKLFIQLVQTYNQLFEENPINASGVDAKAILSARLSKSRRLENLIAQLPGEKKNGLFGNLIALSLGLTPNFKSNFDLAEDAKLQLSKDTYDDDLDNLLAQIGDQYADLFLAAKNLSDAILLSDILRVNTEITKAPLSASMIKRYDEHHQDLTLLKALVRQQLPEKYKEIFFDQSKNGYAGYIDGGASQEEFYKFIKPILEKMDGTEELLVKLNREDLLRKQRTFDNGSIPHQIHLGELHAILRRQEDFYPFLKDNREKIEKILTFRIPYYVGPLARGNSRFAWMTRKSEETITPWNFEEVVDKGASAQSFIERMTNFDKNLPNEKVLPKHSLLYEYFTVYNELTKVKYVTEGMRKPAFLSGEQKKAIVDLLFKTNRKVTVKQLKEDYFKKIECFDSVEISGVEDRFNASLGTYHDLLKIIKDKDFLDNEENEDILEDIVLTLTLFEDREMIEERLKTYAHLFDDKVMKQLKRRRYTGWGRLSRKLINGIRDKQSGKTILDFLKSDGFANRNFMQLIHDDSLTFKEDIQKAQVSGQGDSLHEHIANLAGSPAIKKGILQTVKVVDELVKVMGRHKPENIVIEMARENQTTQKGQKNSRERMKRIEEGIKELGSQILKEHPVENTQLQNEKLYLYYLQNGRDMYVDQELDINRLSDYDVDHIVPQSFLKDDSIDNKVLTRSDKARGKSDNVPSEEVVKKMKNYWRQLLNAKLITQRKFDNLTKAERGGLSELDKAGFIKRQLVETRQITKHVAQILDSRMNTKYDENDKLIREVKVITLKSKLVSDFRKDFQFYKVREINNYHHAHDAYLNAVVGTALIKKYPKLESEFVYGDYKVYDVRKMIAKSEQEIGKATAKYFFYSNIMNFFKTEITLANGEIRKRPLIETNGETGEIVWDKGRDFATVRKVLSMPQVNIVKKTEVQTGGFSKESILPKRNSDKLIARKKDWDPKKYGGFDSPTVAYSVLVVAKVEKGKSKKLKSVKELLGITIMERSSFEKNPIDFLEAKGYKEVKKDLIIKLPKYSLFELENGRKRMLASAGELQKGNELALPSKYVNFLYLASHYEKLKGSPEDNEQKQLFVEQHKHYLDEIIEQISEFSKRVILADANLDKVLSAYNKHRDKPIREQAENIIHLFTLTNLGAPAAFKYFDTTIDRKRYTSTKEVLDATLIHQSITGLYETRIDLSQLGGDGGGGGGGSPAPGGVPWLTQQPLQLTILVPLQEYQEKILSKTALPEDQKQQLKTLFVKYDNLWQHWENQVGHRKIRPHNIATGDYPPRPQKQYPINPKAKPSIQIVIDDLLKQGVLTPQNSTMNTPVYPVPKPDGRWRMVLDYREVNKTIPLTAAQNQHSAGILATIVRQKYKTTLDLANGFWAHPITPESYWLTAFTWQGKQYCWTRLPQGFLNSPALFNADVVDLLKEIPNVQVYVDDIYLSHDDPKEHVQQLEKVFQILLQAGYVVSLKKSEIGQKTVEFLGFNITKEGRGLTDTFKTKLLNITPPKDLKQLQSILGLLNFARNFIPNFAELVQPLYNLIAPAKGKYIEWSEENTKQLNMVIEALNTASNLEERLPEQRLVIKVNTSPSAGYVRYYNETGKKPIMYLNYVFSKAELKFSMLEKLLTTMHKALIKAMDLAMGQEILVYSPIVSMTKIQKTPLPERKALPIRWITWMTYLEDPRIQFHYDKTLPELKHIPDVYTSSQSPVKHPSQYEGVFYTDGSAIKSPDPTKSNNAGMGIVHATYKPEYQVLNQWSIPLGNHTAQMAEIAAVEFACKKALKIPGPVLVITDSFYVAESANKELPYWKSNGFVNNKKKPLKHISKWKSIAECLSMKPDITIQHEKGISLQIPVFILKGNALADKLATQGSYVVNAGKRTADGSEFEKRTADGSEFESPKKKAKVE

SEQ ID NO: 6997 - protein, 2085 aa, synthetic construct
MPAAKRVKLDGGDKKYSIGLDIGTNSVGWAVITDEYKVPSKKFKVLGNTDRHSIKKNLIGALLFDSGETAEATRLKRTARRRYTRRKNRICYLQEIFSNEMAKVDDSFFHRLEESFLVEEDKKHERHPIFGNIVDEVAYHEKYPTIYHLRKKLVDSTDKADLRLIYLALAHMIKFRGHFLIEGDLNPDNSDVDKLFIQLVQTYNQLFEENPINASGVDAKAILSARLSKSRRLENLIAQLPGEKKNGLFGNLIALSLGLTPNFKSNFDLAEDAKLQLSKDTYDDDLDNLLAQIGDQYADLFLAAKNLSDAILLSDILRVNTEITKAPLSASMIKRYDEHHQDLTLLKALVRQQLPEKYKEIFFDQSKNGYAGYIDGGASQEEFYKFIKPILEKMDGTEELLVKLNREDLLRKQRTFDNGSIPHQIHLGELHAILRRQEDFYPFLKDNREKIEKILTFRIPYYVGPLARGNSRFAWMTRKSEETITPWNFEEVVDKGASAQSFIERMTNFDKNLPNEKVLPKHSLLYEYFTVYNELTKVKYVTEGMRKPAFLSGEQKKAIVDLLFKTNRKVTVKQLKEDYFKKIECFDSVEISGVEDRFNASLGTYHDLLKIIKDKDFLDNEENEDILEDIVLTLTLFEDREMIEERLKTYAHLFDDKVMKQLKRRRYTGWGRLSRKLINGIRDKQSGKTILDFLKSDGFANRNFMQLIHDDSLTFKEDIQKAQVSGQGDSLHEHIANLAGSPAIKKGILQTVKVVDELVKVMGRHKPENIVIEMARENQTTQKGQKNSRERMKRIEEGIKELGSQILKEHPVENTQLQNEKLYLYYLQNGRDMYVDQELDINRLSDYDVDHIVPQSFLKDDSIDNKVLTRSDKARGKSDNVPSEEVVKKMKNYWRQLLNAKLITQRKFDNLTKAERGGLSELDKAGFIKRQLVETRQITKHVAQILDSRMNTKYDENDKLIREVKVITLKSKLVSDFRKDFQFYKVREINNYHHAHDAYLNAVVGTALIKKYPKLESEFVYGDYKVYDVRKMIAKSEQEIGKATAKYFFYSNIMNFFKTEITLANGEIRKRPLIETNGETGEIVWDKGRDFATVRKVLSMPQVNIVKKTEVQTGGFSKESILPKRNSDKLIARKKDWDPKKYGGFDSPTVAYSVLVVAKVEKGKSKKLKSVKELLGITIMERSSFEKNPIDFLEAKGYKEVKKDLIIKLPKYSLFELENGRKRMLASAGELQKGNELALPSKYVNFLYLASHYEKLKGSPEDNEQKQLFVEQHKHYLDEIIEQISEFSKRVILADANLDKVLSAYNKHRDKPIREQAENIIHLFTLTNLGAPAAFKYFDTTIDRKRYTSTKEVLDATLIHQSITGLYETRIDLSQLGGDGGGGGGGSPAPGGVPWLTQQPLQLTILVPLQEYQEKILSKTALPEDQKQQLKTLFVKYDNLWQHWENQVGHRKIRPHNIATGDYPPRPQKQYPINPKAKPSIQIVIDDLLKQGVLTPQNSTMNTPVYPVPKPDGRWRMVLDYREVNKTIPLTAAQNQHSAGILATIVRQKYKTTLDLANGFWAHPITPESYWLTAFTWQGKQYCWTRLPQGFLNSPALFNADVVDLLKEIPNVQVYVDDIYLSHDDPKEHVQQLEKVFQILLQAGYVVSLKKSEIGQKTVEFLGFNITKEGRGLTDTFKTKLLNITPPKDLKQLQSILGKLNFARNFIPNFAELVQPLYNLIAPAKGKYIEWSEENTKQLNMVIEALNTASNLEERLPEQRLVIKVNTSPSAGYVRYYNETGKKPIMYLNYVFSKAELKFSMLEKLLTTMHKALIKAMDLAMGQEILVYSPIVSMTKIQKTPLPERKALPIRWITWMTYLEDPRIQFHYDKTLPELKHIPDVYTSSQSPVKHPSQYEGVFYTDGSAIKSPDPTKSNNAGMGIVHATYKPEYQVLNQWSIPLGNHTAQMAEIAAVEFACKKALKIPGPVLVITDSFYVAESANKELPYWKSNGFVNNKKKPLKHISKWKSIAECLSMKPDITIQHEKGISLQIPVFILKGNALADKLATQGSYVVNAGKRTADGSEFEKRTADGSEFESPKKKAKVE

SEQ ID NO: 6998 - protein, 2094 aa, synthetic construct; identical to SEQ ID NO: 4520

SEQ ID NO: 6999 - protein, 2094 aa, synthetic construct
MPAAKRVKLDGGDKKYSIGLDIGTNSVGWAVITDEYKVPSKKFKVLGNTDRHSIKKNLIGALLFDSGETAEATRLKRTARRRYTRRKNRICYLQEIFSNEMAKVDDSFFHRLEESFLVEEDKKHERHPIFGNIVDEVAYHEKYPTIYHLRKKLVDSTDKADLRLIYLALAHMIKFRGHFLIEGDLNPDNSDVDKLFIQLVQTYNQLFEENPINASGVDAKAILSARLSKSRRLENLIAQLPGEKKNGLFGNLIALSLGLTPNFKSNFDLAEDAKLQLSKDTYDDDLDNLLAQIGDQYADLFLAAKNLSDAILLSDILRVNTEITKAPLSASMIKRYDEHHQDLTLLKALVRQQLPEKYKEIFFDQSKNGYAGYIDGGASQEEFYKFIKPILEKMDGTEELLVKLNREDLLRKQRTFDNGSIPHQIHLGELHAILRRQEDFYPFLKDNREKIEKILTFRIPYYVGPLARGNSRFAWMTRKSEETITPWNFEEVVDKGASAQSFIERMTNFDKNLPNEKVLPKHSLLYEYFTVYNELTKVKYVTEGMRKPAFLSGEQKKAIVDLLFKTNRKVTVKQLKEDYFKKIECFDSVEISGVEDRFNASLGTYHDLLKIIKDKDFLDNEENEDILEDIVLTLTLFEDREMIEERLKTYAHLFDDKVMKQLKRRRYTGWGRLSRKLINGIRDKQSGKTILDFLKSDGFANRNFMQLIHDDSLTFKEDIQKAQVSGQGDSLHEHIANLAGSPAIKKGILQTVKVVDELVKVMGRHKPENIVIEMARENQTTQKGQKNSRERMKRIEEGIKELGSQILKEHPVENTQLQNEKLYLYYLQNGRDMYVDQELDINRLSDYDVDHIVPQSFLKDDSIDNKVLTRSDKARGKSDNVPSEEVVKKMKNYWRQLLNAKLITQRKFDNLTKAERGGLSELDKAGFIKRQLVETRQITKHVAQILDSRMNTKYDENDKLIREVKVITLKSKLVSDFRKDFQFYKVREINNYHHAHDAYLNAVVGTALIKKYPKLESEFVYGDYKVYDVRKMIAKSEQEIGKATAKYFFYSNIMNFFKTEITLANGEIRKRPLIETNGETGEIVWDKGRDFATVRKVLSMPQVNIVKKTEVQTGGFSKESILPKRNSDKLIARKKDWDPKKYGGFDSPTVAYSVLVVAKVEKGKSKKLKSVKELLGITIMERSSFEKNPIDFLEAKGYKEVKKDLIIKLPKYSLFELENGRKRMLASAGELQKGNELALPSKYVNFLYLASHYEKLKGSPEDNEQKQLFVEQHKHYLDEIIEQISEFSKRVILADANLDKVLSAYNKHRDKPIREQAENIIHLFTLTNLGAPAAFKYFDTTIDRKRYTSTKEVLDATLIHQSITGLYETRIDLSQLGGDGGGGGGGSPAPGGTLGIEDEYRLHETSTEPDVSLGSTWLSDFPQAWAETGGMGLAVRQAPLIIPLKATSTPVSIQQYPMSHEARLGIKPHIQRLLDQGILVPCQSPWNTPLLPVKKPGTNDYRPVQDLREVNKRVEDIHPTVPNPYNLLSGLPPSHQWYTVLDLKDAFFCLRLHPTSQPLFAFEWRDPGMGISGQLTWTRLPQGFKNSPTLFNEALHRDLADFRIQHPDLILLQYVDDILLAATSELDCQQGTRALLQTLGDLGYRASAKKAQICQKQVKYLGYLLREGQRWLTEARKETVMGQPVPKTPRQLREFLGTAGFCRLWIPGFAEMAAPLYPLTKPGTLFSWGPDQQKAYQEIKQALLTAPALGLPDLTKPFELFVDEKQGYAKGVLTQKLGPWRRPVAYLSKKLDPVAAGWPPCLRMVAAIAVLTKDAGKLTMGQPLVILAPHAVEALVKQPPDRWLSNARMTHYQAMLLDTDRVQFGPVVALNPATLLPLPEEGAPHDCLEILAETHGTRPDLTDQPIPDADHTWYTDGSSFLQEGQRKAGAAVTTETEVIWAGALPAGTSAQRAELIALTQALKMAEGKRLNVYTDSRYAFATAHIHGEIYRRRGWLTSEGREIKNKSEILALLKALFLPKRLSIIHCLGHQKGDSAEARGNRLADQAAREAAIKTPPDTSTLLAGKRTADGSEFEKRTADGSEFESPKKKAKVE

SEQ ID NO: 7000 - protein, 2094 aa, synthetic construct
MPAAKRVKLDGGDKKYSIGLDIGTNSVGWAVITDEYKVPSKKFKVLGNTDRHSIKKNLIGALLFDSGETAEATRLKRTARRRYTRRKNRICYLQEIFSNEMAKVDDSFFHRLEESFLVEEDKKHERHPIFGNIVDEVAYHEKYPTIYHLRKKLVDSTDKADLRLIYLALAHMIKFRGHFLIEGDLNPDNSDVDKLFIQLVQTYNQLFEENPINASGVDAKAILSARLSKSRRLENLIAQLPGEKKNGLFGNLIALSLGLTPNFKSNFDLAEDAKLQLSKDTYDDDLDNLLAQIGDQYADLFLAAKNLSDAILLSDILRVNTEITKAPLSASMIKRYDEHHQDLTLLKALVRQQLPEKYKEIFFDQSKNGYAGYIDGGASQEEFYKFIKPILEKMDGTEELLVKLNREDLLRKQRTFDNGSIPHQIHLGELHAILRRQEDFYPFLKDNREKIEKILTFRIPYYVGPLARGNSRFAWMTRKSEETITPWNFEEVVDKGASAQSFIERMTNFDKNLPNEKVLPKHSLLYEYFTVYNELTKVKYVTEGMRKPAFLSGEQKKAIVDLLFKTNRKVTVKQLKEDYFKKIECFDSVEISGVEDRFNASLGTYHDLLKIIKDKDFLDNEENEDILEDIVLTLTLFEDREMIEERLKTYAHLFDDKVMKQLKRRRYTGWGRLSRKLINGIRDKQSGKTILDFLKSDGFANRNFMQLIHDDSLTFKEDIQKAQVSGQGDSLHEHIANLAGSPAIKKGILQTVKVVDELVKVMGRHKPENIVIEMARENQTTQKGQKNSRERMKRIEEGIKELGSQILKEHPVENTQLQNEKLYLYYLQNGRDMYVDQELDINRLSDYDVDHIVPQSFLKDDSIDNKVLTRSDKARGKSDNVPSEEVVKKMKNYWRQLLNAKLITQRKFDNLTKAERGGLSELDKAGFIKRQLVETRQITKHVAQILDSRMNTKYDENDKLIREVKVITLKSKLVSDFRKDFQFYKVREINNYHHAHDAYLNAVVGTALIKKYPKLESEFVYGDYKVYDVRKMIAKSEQEIGKATAKYFFYSNIMNFFKTEITLANGEIRKRPLIETNGETGEIVWDKGRDFATVRKVLSMPQVNIVKKTEVQTGGFSKESILPKRNSDKLIARKKDWDPKKYGGFDSPTVAYSVLVVAKVEKGKSKKLKSVKELLGITIMERSSFEKNPIDFLEAKGYKEVKKDLIIKLPKYSLFELENGRKRMLASAGELQKGNELALPSKYVNFLYLASHYEKLKGSPEDNEQKQLFVEQHKHYLDEIIEQISEFSKRVILADANLDKVLSAYNKHRDKPIREQAENIIHLFTLTNLGAPAAFKYFDTTIDRKRYTSTKEVLDATLIHQSITGLYETRIDLSQLGGDGGGGGGGSPAPGGTLNIEDEYRLHETSKEPDVSLGSTWLSDFPQAWAETGGMGLAVRQAPLIIPLKATSTPVSIKQYPMSQEARLGIKPHIQRLLDQGILVPCQSPWNTPLLPVKKPGTNDYRPVQDLREVNKRVEDIHPTVPNPYNLLSGLPPSHQWYTVLDLKDAFFCLRLHPTSQPLFAFEWRDPEMGISGQLTWTRLPQGFKNSPTLFDEALHRDLAGFRIQHPDLILLQYVDDLLLAATSELDCQQGTRALLQTLGDLGYRASAKKAQICQKQVKYLGYLLKEGQRWLTEARKETVMGQPIPKTPRQLREFLGTAGFCRLWIPGFAEMAAPLYPLTKTGTLFNWGPDQQKAFQEIKQALLTAPALGLPDLTKPFELFVDEKQGYAKGVLTQKLGPWRRPVAYLSKKLDPVAAGWPPCLRMVAAIAVLTKDAGKLTMGQPLVILAPHAVEALVKQPPDRWLSNARMTHYQALLLDTDRVQFGPVVALNPATLLPLPEEGLQHDCLDILAEAHGTRSDLMDQPLPDADHTWYTDGSSFLQEGQRKAGAAVTTETEVIWARALPAGTSAQRAELIALTQALKMAEGKKLNVYTDSRYAFATAHIHGEIYRRRGLLTSEGKEIKNKDEILALLKALFLPKRLSIIHCPGHQKGNSAEARGNRMADQAAREVATRETPETSTLLAGKRTADGSEFEKRTADGSEFESPKKKAKVE

SEQ ID NO: 7001 - protein, 2094 aa, synthetic construct
MPAAKRVKLDGGDKKYSIGLDIGTNSVGWAVITDEYKVPSKKFKVLGNTDRHSIKKNLIGALLFDSGETAEATRLKRTARRRYTRRKNRICYLQEIFSNEMAKVDDSFFHRLEESFLVEEDKKHERHPIFGNIVDEVAYHEKYPTIYHLRKKLVDSTDKADLRLIYLALAHMIKFRGHFLIEGDLNPDNSDVDKLFIQLVQTYNQLFEENPINASGVDAKAILSARLSKSRRLENLIAQLPGEKKNGLFGNLIALSLGLTPNFKSNFDLAEDAKLQLSKDTYDDDLDNLLAQIGDQYADLFLAAKNLSDAILLSDILRVNTEITKAPLSASMIKRYDEHHQDLTLLKALVRQQLPEKYKEIFFDQSKNGYAGYIDGGASQEEFYKFIKPILEKMDGTEELLVKLNREDLLRKQRTFDNGSIPHQIHLGELHAILRRQEDFYPFLKDNREKIEKILTFRIPYYVGPLARGNSRFAWMTRKSEETITPWNFEEVVDKGASAQSFIERMTNFDKNLPNEKVLPKHSLLYEYFTVYNELTKVKYVTEGMRKPAFLSGEQKKAIVDLLFKTNRKVTVKQLKEDYFKKIECFDSVEISGVEDRFNASLGTYHDLLKIIKDKDFLDNEENEDILEDIVLTLTLFEDREMIEERLKTYAHLFDDKVMKQLKRRRYTGWGRLSRKLINGIRDKQSGKTILDFLKSDGFANRNFMQLIHDDSLTFKEDIQKAQVSGQGDSLHEHIANLAGSPAIKKGILQTVKVVDELVKVMGRHKPENIVIEMARENQTTQKGQKNSRERMKRIEEGIKELGSQILKEHPVENTQLQNEKLYLYYLQNGRDMYVDQELDINRLSDYDVDHIVPQSFLKDDSIDNKVLTRSDKARGKSDNVPSEEVVKKMKNYWRQLLNAKLITQRKFDNLTKAERGGLSELDKAGFIKRQLVETRQITKHVAQILDSRMNTKYDENDKLIREVKVITLKSKLVSDFRKDFQFYKVREINNYHHAHDAYLNAVVGTALIKKYPKLESEFVYGDYKVYDVRKMIAKSEQEIGKATAKYFFYSNIMNFFKTEITLANGEIRKRPLIETNGETGEIVWDKGRDFATVRKVLSMPQVNIVKKTEVQTGGFSKESILPKRNSDKLIARKKDWDPKKYGGFDSPTVAYSVLVVAKVEKGKSKKLKSVKELLGITIMERSSFEKNPIDFLEAKGYKEVKKDLIIKLPKYSLFELENGRKRMLASAGELQKGNELALPSKYVNFLYLASHYEKLKGSPEDNEQKQLFVEQHKHYLDEIIEQISEFSKRVILADANLDKVLSAYNKHRDKPIREQAENIIHLFTLTNLGAPAAFKYFDTTIDRKRYTSTKEVLDATLIHQSITGLYETRIDLSQLGGDGGGGGGGSPAPGGTLNIEDEYRLHETSKEPDVSLGSTWLSDFPQAWAETGGMGLAVRQAPLIIPLKATSTPVSIKQYPMSQEARLGIKPHIQRLLDQGILVPCQSPWNTPLLPVKKPGTNDYRPVQDLREVNKRVEDIHPTVPNPYNLLSGLPPSHQWYTVLDLKDAFFCLRLHPTSQPLFAFEWRDPEMGISGQLTWTRLPQGFKNSPTLFNEALHRDLAGFRIQHPDLILLQYVDDLLLAATSELDCQQGTRALLQTLGDLGYRASAKKAQICQKQVKYLGYLLKEGQRWLTEARKETVMGQPIPKTPRQLREFLGTAGFCRLWIPGFAEMAAPLYPLTKPGTLFNWGPDQQKAFQEIKQALLTAPALGLPDLTKPFELFVDEKQGYAKGVLTQKLGPWRRPVAYLSKKLDPVAAGWPPCLRMVAAIAVLTKDAGKLTMGQPLVILAPHAVEALVKQPPDRWLSNARMTHYQALLLDTDRVQFGPVVALNPATLLPLPEEGLQHDCLDILAEAHGTRSDLMDQPLPDADHTWYTDGSSFLQEGQRKAGAAVTTETEVIWARALPAGTSAQRAELIALTQALKMAEGKKLNVYTDSRYAFATAHIHGEIYRRRGWLTSEGKEIKNKDEILALLKALFLPKRLSIIHCPGHQKGNSAEARGNRMADQAAREVATRETPETSTLLAGKRTADGSEFEKRTADGSEFESPKKKAKVE

SEQ ID NO: 7002 - protein, 2114 aa, synthetic construct
MPAAKRVKLDGGDKKYSIGLDIGTNSVGWAVITDEYKVPSKKFKVLGNTDRHSIKKNLIGALLFDSGETAEATRLKRTARRRYTRRKNRICYLQEIFSNEMAKVDDSFFHRLEESFLVEEDKKHERHPIFGNIVDEVAYHEKYPTIYHLRKKLVDSTDKADLRLIYLALAHMIKFRGHFLIEGDLNPDNSDVDKLFIQLVQTYNQLFEENPINASGVDAKAILSARLSKSRRLENLIAQLPGEKKNGLFGNLIALSLGLTPNFKSNFDLAEDAKLQLSKDTYDDDLDNLLAQIGDQYADLFLAAKNLSDAILLSDILRVNTEITKAPLSASMIKRYDEHHQDLTLLKALVRQQLPEKYKEIFFDQSKNGYAGYIDGGASQEEFYKFIKPILEKMDGTEELLVKLNREDLLRKQRTFDNGSIPHQIHLGELHAILRRQEDFYPFLKDNREKIEKILTFRIPYYVGPLARGNSRFAWMTRKSEETITPWNFEEVVDKGASAQSFIERMTNFDKNLPNEKVLPKHSLLYEYFTVYNELTKVKYVTEGMRKPAFLSGEQKKAIVDLLFKTNRKVTVKQLKEDYFKKIECFDSVEISGVEDRFNASLGTYHDLLKIIKDKDFLDNEENEDILEDIVLTLTLFEDREMIEERLKTYAHLFDDKVMKQLKRRRYTGWGRLSRKLINGIRDKQSGKTILDFLKSDGFANRNFMQLIHDDSLTFKEDIQKAQVSGQGDSLHEHIANLAGSPAIKKGILQTVKVVDELVKVMGRHKPENIVIEMARENQTTQKGQKNSRERMKRIEEGIKELGSQILKEHPVENTQLQNEKLYLYYLQNGRDMYVDQELDINRLSDYDVDHIVPQSFLKDDSIDNKVLTRSDKARGKSDNVPSEEVVKKMKNYWRQLLNAKLITQRKFDNLTKAERGGLSELDKAGFIKRQLVETRQITKHVAQILDSRMNTKYDENDKLIREVKVITLKSKLVSDFRKDFQFYKVREINNYHHAHDAYLNAVVGTALIKKYPKLESEFVYGDYKVYDVRKMIAKSEQEIGKATAKYFFYSNIMNFFKTEITLANGEIRKRPLIETNGETGEIVWDKGRDFATVRKVLSMPQVNIVKKTEVQTGGFSKESILPKRNSDKLIARKKDWDPKKYGGFDSPTVAYSVLVVAKVEKGKSKKLKSVKELLGITIMERSSFEKNPIDFLEAKGYKEVKKDLIIKLPKYSLFELENGRKRMLASAGELQKGNELALPSKYVNFLYLASHYEKLKGSPEDNEQKQLFVEQHKHYLDEIIEQISEFSKRVILADANLDKVLSAYNKHRDKPIREQAENIIHLFTLTNLGAPAAFKYFDTTIDRKRYTSTKEVLDATLIHQSITGLYETRIDLSQLGGDGGGGGGGSPAPGGVQEISDSRPMLHIYLNGRRFLGLLDTGADKTCIAGRDWPANWPIHQTESSLQGLGMACGVARSSQPLRWQHEDKSGIIHPFVIPTLPFTLWGRDIMKDIKVRLMTDSPDDSQDLMIGAIESNLFADQISWKSDQPVWLNQWPLKQEKLQALQQLVTEQLQLGHLEESNSPWNTPVFVIKKKSGKWRLLQDLRAVNATMHDMGALQPGLPSPVAVPKGWEIIIIDLQDCFFNIKLHPEDCKRFAFSVPSPNFKRPYQRFQWKVLPQGMKNSPTLCQKFVDKAILTVRDKYQDSYIVHYMDDILLAHPSRSIVDEILTSMIQALNKHGLVVSTEKIQKYDNLKYLGTHIQGDSVSYQKLQIRTDKLRTLNDFQKLLGNINWIRPFLKLTTGELKPLFEILNGDSNPISTRKLTPEACKALQLMNERLSTARVKRLDLSQPWSLCILKTEYTPTACLWQDGVVEWIHLPHISPKVITPYDIFCTQLIIKGRHRSKELFSKDPDYIVVPYTKVQFDLLLQEKEDWPISLLGFLGEVHFHLPKDPLLTFTLQTAIIFPHMTSTTPLEKGIVIFTDGSANGRSVTYIQGREPIIKENTQNTAQQAEIVAVITAFEEVSQPFNLYTDSKYVTGLFPEIETATLSPRTKIYTELKHLQRLIHKRQEKFYIGHIRGHTGLPGPLAQGNAYADSLTRILTAAGKRTADGSEFEKRTADGSEFESPKKKAKVE

SEQ ID NO: 7003 - protein, 2088 aa, synthetic construct
MPAAKRVKLDGGDKKYSIGLDIGTNSVGWAVITDEYKVPSKKFKVLGNTDRHSIKKNLIGALLFDSGETAEATRLKRTARRRYTRRKNRICYLQEIFSNEMAKVDDSFFHRLEESFLVEEDKKHERHPIFGNIVDEVAYHEKYPTIYHLRKKLVDSTDKADLRLIYLALAHMIKFRGHFLIEGDLNPDNSDVDKLFIQLVQTYNQLFEENPINASGVDAKAILSARLSKSRRLENLIAQLPGEKKNGLFGNLIALSLGLTPNFKSNFDLAEDAKLQLSKDTYDDDLDNLLAQIGDQYADLFLAAKNLSDAILLSDILRVNTEITKAPLSASMIKRYDEHHQDLTLLKALVRQQLPEKYKEIFFDQSKNGYAGYIDGGASQEEFYKFIKPILEKMDGTEELLVKLNREDLLRKQRTFDNGSIPHQIHLGELHAILRRQEDFYPFLKDNREKIEKILTFRIPYYVGPLARGNSRFAWMTRKSEETITPWNFEEVVDKGASAQSFIERMTNFDKNLPNEKVLPKHSLLYEYFTVYNELTKVKYVTEGMRKPAFLSGEQKKAIVDLLFKTNRKVTVKQLKEDYFKKIECFDSVEISGVEDRFNASLGTYHDLLKIIKDKDFLDNEENEDILEDIVLTLTLFEDREMIEERLKTYAHLFDDKVMKQLKRRRYTGWGRLSRKLINGIRDKQSGKTILDFLKSDGFANRNFMQLIHDDSLTFKEDIQKAQVSGQGDSLHEHIANLAGSPAIKKGILQTVKVVDELVKVMGRHKPENIVIEMARENQTTQKGQKNSRERMKRIEEGIKELGSQILKEHPVENTQLQNEKLYLYYLQNGRDMYVDQELDINRLSDYDVDHIVPQSFLKDDSIDNKVLTRSDKARGKSDNVPSEEVVKKMKNYWRQLLNAKLITQRKFDNLTKAERGGLSELDKAGFIKRQLVETRQITKHVAQILDSRMNTKYDENDKLIREVKVITLKSKLVSDFRKDFQFYKVREINNYHHAHDAYLNAVVGTALIKKYPKLESEFVYGDYKVYDVRKMIAKSEQEIGKATAKYFFYSNIMNFFKTEITLANGEIRKRPLIETNGETGEIVWDKGRDFATVRKVLSMPQVNIVKKTEVQTGGFSKESILPKRNSDKLIARKKDWDPKKYGGFDSPTVAYSVLVVAKVEKGKSKKLKSVKELLGITIMERSSFEKNPIDFLEAKGYKEVKKDLIIKLPKYSLFELENGRKRMLASAGELQKGNELALPSKYVNFLYLASHYEKLKGSPEDNEQKQLFVEQHKHYLDEIIEQISEFSKRVILADANLDKVLSAYNKHRDKPIREQAENIIHLFTLTNLGAPAAFKYFDTTIDRKRYTSTKEVLDATLIHQSITGLYETRIDLSQLGGDGGGGGGGSPAPGGTLQLDDEYRLYSPLVKPDQNIQFWLEQFPQAWAETAGMGLAKQVPPQVIQLKASATPVSVRQYPLSKEAQEGIRPHVQRLIQQGILVPVQSPWNTPLLPVRKPGTNDYRPVQDLREVNKRVQDIHPTVPNPYNLLCALPPQRSWYTVLDLKDAFFCLRLHPTSQPLFAFEWRDPGTGRTGQLTWTRLPQGFKNSPTIFDEALHRDLANFRIQHPQVTLLQYVDDLLLAGATKQDCLEGTKALLLELSDLGYRASAKKAQICRREVTYLGYSLRDGQRWLTEARKKTVVQIPAPTTAKQVREFLGTAGFCRLWIPGFATLAAPLYPLTKEKGEFSWAPEHQKAFDAIKKALLSAPALALPDVTKPFTLYVDERKGVARGVLTQTLGPWRRPVAYLSKKLDPVASGWPVCLKAIAAVAILVKDADKLTLGQNITVIAPHALENIVRQPPDRWMTNARMTHYQSLLLTERVTFAPPAALNPATLLPEETDEPVTHDCHQLLIEETGVRKDLTDIPLTGEVLTWFTDGSSYVVEGKRMAGAAVVDGTRTIWASSLPEGTSAQKAELMALTQALRLAEGKSINIYTDSRYAFATAHVHGAIYKQRGLLTSAGREIKNKEEILSLLEALHLPKRLAIIHCPGHQKAKDPISRGNQMADRVAKQAAQGVNLLAGKRTADGSEFEKRTADGSEFESPKKKAKVE

SEQ ID NO: 7004 - protein, 2174 aa, synthetic construct
MPAAKRVKLDGGDKKYSIGLDIGTNSVGWAVITDEYKVPSKKFKVLGNTDRHSIKKNLIGALLFDSGETAEATRLKRTARRRYTRRKNRICYLQEIFSNEMAKVDDSFFHRLEESFLVEEDKKHERHPIFGNIVDEVAYHEKYPTIYHLRKKLVDSTDKADLRLIYLALAHMIKFRGHFLIEGDLNPDNSDVDKLFIQLVQTYNQLFEENPINASGVDAKAILSARLSKSRRLENLIAQLPGEKKNGLFGNLIALSLGLTPNFKSNFDLAEDAKLQLSKDTYDDDLDNLLAQIGDQYADLFLAAKNLSDAILLSDILRVNTEITKAPLSASMIKRYDEHHQDLTLLKALVRQQLPEKYKEIFFDQSKNGYAGYIDGGASQEEFYKFIKPILEKMDGTEELLVKLNREDLLRKQRTFDNGSIPHQIHLGELHAILRRQEDFYPFLKDNREKIEKILTFRIPYYVGPLARGNSRFAWMTRKSEETITPWNFEEVVDKGASAQSFIERMTNFDKNLPNEKVLPKHSLLYEYFTVYNELTKVKYVTEGMRKPAFLSGEQKKAIVDLLFKTNRKVTVKQLKEDYFKKIECFDSVEISGVEDRFNASLGTYHDLLKIIKDKDFLDNEENEDILEDIVLTLTLFEDREMIEERLKTYAHLFDDKVMKQLKRRRYTGWGRLSRKLINGIRDKQSGKTILDFLKSDGFANRNFMQLIHDDSLTFKEDIQKAQVSGQGDSLHEHIANLAGSPAIKKGILQTVKVVDELVKVMGRHKPENIVIEMARENQTTQKGQKNSRERMKRIEEGIKELGSQILKEHPVENTQLQNEKLYLYYLQNGRDMYVDQELDINRLSDYDVDHIVPQSFLKDDSIDNKVLTRSDKARGKSDNVPSEEVVKKMKNYWRQLLNAKLITQRKFDNLTKAERGGLSELDKAGFIKRQLVETRQITKHVAQILDSRMNTKYDENDKLIREVKVITLKSKLVSDFRKDFQFYKVREINNYHHAHDAYLNAVVGTALIKKYPKLESEFVYGDYKVYDVRKMIAKSEQEIGKATAKYFFYSNIMNFFKTEITLANGEIRKRPLIETNGETGEIVWDKGRDFATVRKVLSMPQVNIVKKTEVQTGGFSKESILPKRNSDKLIARKKDWDPKKYGGFDSPTVAYSVLVVAKVEKGKSKKLKSVKELLGITIMERSSFEKNPIDFLEAKGYKEVKKDLIIKLPKYSLFELENGRKRMLASAGELQKGNELALPSKYVNFLYLASHYEKLKGSPEDNEQKQLFVEQHKHYLDEIIEQISEFSKRVILADANLDKVLSAYNKHRDKPIREQAENIIHLFTLTNLGAPAAFKYFDTTIDRKRYTSTKEVLDATLIHQSITGLYETRIDLSQLGGDGGGGGGGSPAPGGMDPLQLLQPLEAEIKGTKLKAHWNSGATITCVPEAFLEDERPIQTMLIKTIHGEKQQDVYYLTFKVQGRKVEAEVLASPYDYILLNPSDVPWLMKKPLQLTVLVPLHEYQERLLQQTALPKEQKELLQKLFLKYDALWQHWENQVGHRRIKPHNIATGTLAPRPQKQYPINPKAKPSIQIVIDDLLKQGVLIQQNSTMNTPVYPVPKPDGKWRMVLDYREVNKTIPLIAAQNQHSAGILSSIYRGKYKTTLDLTNGFWAHPITPESYWLTAFTWQGKQYCWTRLPQGFLNSPALFNADVVDLLKEIPNVQAYVDDIYISHDDPQEHLEQLEKIFSILLNAGYVVSLKKSEIAQREVEFLGFNITKEGRGLTDTFKQKLLNITPPKDLKQLQSILGLLNFARNFIPNYSELVKPLYTIVAPANGKFISWTEDNSNQLQHIISVLNQADNLEERNPETRLIIKVNSSPSAGYIRYYNEGSKRPIMYVNYIFSKAEAKFTQTEKLLTTMHKGLIKAMDLAMGQEILVYSPIVSMTKIQRTPLPERKALPVRWITWMTYLEDPRIQFHYDKSLPELQQIPNVTEDVIAKTKHPSEFAMVFYTDGSAIKHPDVNKSHSAGMGIAQVQFIPEYKIVHQWSIPLGDHTAQLAEIAAVEFACKKALKISGPVLIVTDSFYVAESANKELPYWKSNGFLNNKKKPLRHVSKWKSIAECLQLKPDIIIMHEKGHQQPMTTLHTEGNNLADKLATQGSYVVHAGKRTADGSEFEKRTADGSEFESPKKKAKVE

SEQ ID NO: 7005 - protein, 2085 aa, synthetic construct
MPAAKRVKLDGGDKKYSIGLDIGTNSVGWAVITDEYKVPSKKFKVLGNTDRHSIKKNLIGALLFDSGETAEATRLKRTARRRYTRRKNRICYLQEIFSNEMAKVDDSFFHRLEESFLVEEDKKHERHPIFGNIVDEVAYHEKYPTIYHLRKKLVDSTDKADLRLIYLALAHMIKFRGHFLIEGDLNPDNSDVDKLFIQLVQTYNQLFEENPINASGVDAKAILSARLSKSRRLENLIAQLPGEKKNGLFGNLIALSLGLTPNFKSNFDLAEDAKLQLSKDTYDDDLDNLLAQIGDQYADLFLAAKNLSDAILLSDILRVNTEITKAPLSASMIKRYDEHHQDLTLLKALVRQQLPEKYKEIFFDQSKNGYAGYIDGGASQEEFYKFIKPILEKMDGTEELLVKLNREDLLRKQRTFDNGSIPHQIHLGELHAILRRQEDFYPFLKDNREKIEKILTFRIPYYVGPLARGNSRFAWMTRKSEETITPWNFEEVVDKGASAQSFIERMTNFDKNLPNEKVLPKHSLLYEYFTVYNELTKVKYVTEGMRKPAFLSGEQKKAIVDLLFKTNRKVTVKQLKEDYFKKIECFDSVEISGVEDRFNASLGTYHDLLKIIKDKDFLDNEENEDILEDIVLTLTLFEDREMIEERLKTYAHLFDDKVMKQLKRRRYTGWGRLSRKLINGIRDKQSGKTILDFLKSDGFANRNFMQLIHDDSLTFKEDIQKAQVSGQGDSLHEHIANLAGSPAIKKGILQTVKVVDELVKVMGRHKPENIVIEMARENQTTQKGQKNSRERMKRIEEGIKELGSQILKEHPVENTQLQNEKLYLYYLQNGRDMYVDQELDINRLSDYDVDHIVPQSFLKDDSIDNKVLTRSDKARGKSDNVPSEEVVKKMKNYWRQLLNAKLITQRKFDNLTKAERGGLSELDKAGFIKRQLVETRQITKHVAQILDSRMNTKYDENDKLIREVKVITLKSKLVSDFRKDFQFYKVREINNYHHAHDAYLNAVVGTALIKKYPKLESEFVYGDYKVYDVRKMIAKSEQEIGKATAKYFFYSNIMNFFKTEITLANGEIRKRPLIETNGETGEIVWDKGRDFATVRKVLSMPQVNIVKKTEVQTGGFSKESILPKRNSDKLIARKKDWDPKKYGGFDSPTVAYSVLVVAKVEKGKSKKLKSVKELLGITIMERSSFEKNPIDFLEAKGYKEVKKDLIIKLPKYSLFELENGRKRMLASAGELQKGNELALPSKYVNFLYLASHYEKLKGSPEDNEQKQLFVEQHKHYLDEIIEQISEFSKRVILADANLDKVLSAYNKHRDKPIREQAENIIHLFTLTNLGAPAAFKYFDTTIDRKRYTSTKEVLDATLIHQSITGLYETRIDLSQLGGDGGGGGGGSPAPGGIPWLMKKPLQLTTLVPLQEYEERLLKQTMLTGSYKEKLQSLFLKYDALWQHWENQVGHRRIKPHHIATGTVNPRPQKQYPINPKAKASIQTVINDLLKQGVLIQQNSIMNTPVYPVPKPDGKWRMVLDYREVNKTIPLIAAQNQHSAGILSSIFRGKYKTTLDLSNGFWAHSITPESYWLTAFTWLGQQYCWTRLPQGFLNSPALFNADVVDLLKEVPNVQVYVDDIYISHDDPREHLEQLEKVFSLLLNAGYVVSLKKSEIAQHEVEFLGFNITKEGRGLTETFKQKLLNITPPRDLKQLQSILGLLNFARNFIPNFSELVKPLYNIIATAPGKYITWTTDNSQQLQNIISMLNSAENLEERNPEVRLIMKVNTSPSAGYIRFYNEFAKRPIMYLNYVYTKAEVKFTNTEKLLTTIHKGLIKALDLGMGQEILVYSPIVSMTKIQKTPLPERKALPIRWITWMSYLEDPRIQFHYDKTLPELQQVPTVTDDIIAKIKHPSEFSMVFYTDGSAIKHPNVNKSHNAGMGIAQVQFKPEFTVINTWSIPLGDHTAQLAEVAAVEFACKKALKIDGPVLIVTDSFYVAESVNKELPYWQSNGFFNNKKKPLKHVSKWKSIADCIQLKPDIIIIHEKGHQPTASTFHTEGNNLADKLATQGSYVVNAGKRTADGSEFEKRTADGSEFESPKKKAKVE

SEQ ID NO: 7006 - protein, 2085 aa, synthetic construct
MPAAKRVKLDGGDKKYSIGLDIGTNSVGWAVITDEYKVPSKKFKVLGNTDRHSIKKNLIGALLFDSGETAEATRLKRTARRRYTRRKNRICYLQEIFSNEMAKVDDSFFHRLEESFLVEEDKKHERHPIFGNIVDEVAYHEKYPTIYHLRKKLVDSTDKADLRLIYLALAHMIKFRGHFLIEGDLNPDNSDVDKLFIQLVQTYNQLFEENPINASGVDAKAILSARLSKSRRLENLIAQLPGEKKNGLFGNLIALSLGLTPNFKSNFDLAEDAKLQLSKDTYDDDLDNLLAQIGDQYADLFLAAKNLSDAILLSDILRVNTEITKAPLSASMIKRYDEHHQDLTLLKALVRQQLPEKYKEIFFDQSKNGYAGYIDGGASQEEFYKFIKPILEKMDGTEELLVKLNREDLLRKQRTFDNGSIPHQIHLGELHAILRRQEDFYPFLKDNREKIEKILTFRIPYYVGPLARGNSRFAWMTRKSEETITPWNFEEVVDKGASAQSFIERMTNFDKNLPNEKVLPKHSLLYEYFTVYNELTKVKYVTEGMRKPAFLSGEQKKAIVDLLFKTNRKVTVKQLKEDYFKKIECFDSVEISGVEDRFNASLGTYHDLLKIIKDKDFLDNEENEDILEDIVLTLTLFEDREMIEERLKTYAHLFDDKVMKQLKRRRYTGWGRLSRKLINGIRDKQSGKTILDFLKSDGFANRNFMQLIHDDSLTFKEDIQKAQVSGQGDSLHEHIANLAGSPAIKKGILQTVKVVDELVKVMGRHKPENIVIEMARENQTTQKGQKNSRERMKRIEEGIKELGSQILKEHPVENTQLQNEKLYLYYLQNGRDMYVDQELDINRLSDYDVDHIVPQSFLKDDSIDNKVLTRSDKARGKSDNVPSEEVVKKMKNYWRQLLNAKLITQRKFDNLTKAERGGLSELDKAGFIKRQLVETRQITKHVAQILDSRMNTKYDENDKLIREVKVITLKSKLVSDFRKDFQFYKVREINNYHHAHDAYLNAVVGTALIKKYPKLESEFVYGDYKVYDVRKMIAKSEQEIGKATAKYFFYSNIMNFFKTEITLANGEIRKRPLIETNGETGEIVWDKGRDFATVRKVLSMPQVNIVKKTEVQTGGFSKESILPKRNSDKLIARKKDWDPKKYGGFDSPTVAYSVLVVAKVEKGKSKKLKSVKELLGITIMERSSFEKNPIDFLEAKGYKEVKKDLIIKLPKYSLFELENGRKRMLASAGELQKGNELALPSKYVNFLYLASHYEKLKGSPEDNEQKQLFVEQHKHYLDEIIEQISEFSKRVILADANLDKVLSAYNKHRDKPIREQAENIIHLFTLTNLGAPAAFKYFDTTIDRKRYTSTKEVLDATLIHQSITGLYETRIDLSQLGGDGGGGGGGSPAPGGIPWLMKKPLQLTTLVPLQEYEERLLKQTMLTGSYKEKLQSLFLKYDALWQHWENQVGHRRIKPHHIATGTVNPRPQKQYPINPKAKASIQTVINDLLKQGVLIQQNSIMNTPVYPVPKPDGKWRMVLDYREVNKTIPLIAAQNQHSAGILSSIFRGKYKTTLDLSNGFWAHSITPESYWLTAFTWLGQQYCWTRLPQGFLNSPALFNADVVDLLKEVPNVQVYVDDIYISHDDPREHLEQLEKVFSLLLNAGYVVSLKKSEIAQHEVEFLGFNITKEGRGLTETFKQKLLNITPPRDLKQLQSILGKLNFARNFIPNFSELVKPLYNIIATAPGKYITWTTDNSQQLQNIISMLNSAENLEERNPEVRLIMKVNTSPSAGYIRFYNEFAKRPIMYLNYVYTKAEVKFTNTEKLLTTIHKGLIKALDLGMGQEILVYSPIVSMTKIQKTPLPERKALPIRWITWMSYLEDPRIQFHYDKTLPELQQVPTVTDDIIAKIKHPSEFSMVFYTDGSAIKHPNVNKSHNAGMGIAQVQFKPEFTVINTWSIPLGDHTAQLAEVAAVEFACKKALKIDGPVLIVTDSFYVAESVNKELPYWQSNGFFNNKKKPLKHVSKWKSIADCIQLKPDIIIIHEKGHQPTASTFHTEGNNLADKLATQGSYVVNAGKRTADGSEFEKRTADGSEFESPKKKAKVE

SEQ ID NO: 7007 - protein, 2174 aa, synthetic construct
MPAAKRVKLDGGDKKYSIGLDIGTNSVGWAVITDEYKVPSKKFKVLGNTDRHSIKKNLIGALLFDSGETAEATRLKRTARRRYTRRKNRICYLQEIFSNEMAKVDDSFFHRLEESFLVEEDKKHERHPIFGNIVDEVAYHEKYPTIYHLRKKLVDSTDKADLRLIYLALAHMIKFRGHFLIEGDLNPDNSDVDKLFIQLVQTYNQLFEENPINASGVDAKAILSARLSKSRRLENLIAQLPGEKKNGLFGNLIALSLGLTPNFKSNFDLAEDAKLQLSKDTYDDDLDNLLAQIGDQYADLFLAAKNLSDAILLSDILRVNTEITKAPLSASMIKRYDEHHQDLTLLKALVRQQLPEKYKEIFFDQSKNGYAGYIDGGASQEEFYKFIKPILEKMDGTEELLVKLNREDLLRKQRTFDNGSIPHQIHLGELHAILRRQEDFYPFLKDNREKIEKILTFRIPYYVGPLARGNSRFAWMTRKSEETITPWNFEEVVDKGASAQSFIERMTNFDKNLPNEKVLPKHSLLYEYFTVYNELTKVKYVTEGMRKPAFLSGEQKKAIVDLLFKTNRKVTVKQLKEDYFKKIECFDSVEISGVEDRFNASLGTYHDLLKIIKDKDFLDNEENEDILEDIVLTLTLFEDREMIEERLKTYAHLFDDKVMKQLKRRRYTGWGRLSRKLINGIRDKQSGKTILDFLKSDGFANRNFMQLIHDDSLTFKEDIQKAQVSGQGDSLHEHIANLAGSPAIKKGILQTVKVVDELVKVMGRHKPENIVIEMARENQTTQKGQKNSRERMKRIEEGIKELGSQILKEHPVENTQLQNEKLYLYYLQNGRDMYVDQELDINRLSDYDVDHIVPQSFLKDDSIDNKVLTRSDKARGKSDNVPSEEVVKKMKNYWRQLLNAKLITQRKFDNLTKAERGGLSELDKAGFIKRQLVETRQITKHVAQILDSRMNTKYDENDKLIREVKVITLKSKLVSDFRKDFQFYKVREINNYHHAHDAYLNAVVGTALIKKYPKLESEFVYGDYKVYDVRKMIAKSEQEIGKATAKYFFYSNIMNFFKTEITLANGEIRKRPLIETNGETGEIVWDKGRDFATVRKVLSMPQVNIVKKTEVQTGGFSKESILPKRNSDKLIARKKDWDPKKYGGFDSPTVAYSVLVVAKVEKGKSKKLKSVKELLGITIMERSSFEKNPIDFLEAKGYKEVKKDLIIKLPKYSLFELENGRKRMLASAGELQKGNELALPSKYVNFLYLASHYEKLKGSPEDNEQKQLFVEQHKHYLDEIIEQISEFSKRVILADANLDKVLSAYNKHRDKPIREQAENIIHLFTLTNLGAPAAFKYFDTTIDRKRYTSTKEVLDATLIHQSITGLYETRIDLSQLGGDGGGGGGGSPAPGGMDPLQLLQPLEAEIKGTKLKAHWNSGATITCVPQAFLEEEVPIKNIWIKTIHGEKEQPVYYLTFKIQGRKVEAEVISSPYDYILVSPSDIPWLMKKPLQLTTLVPLQEYEERLLKQTMLTGSYKEKLQSLFLKYDALWQHWENQVGHRRIKPHHIATGTVNPRPQKQYPINPKAKASIQTVINDLLKQGVLIQQNSIMNTPVYPVPKPDGKWRMVLDYREVNKTIPLIAAQNQHSAGILSSIFRGKYKTTLDLSNGFWAHSITPESYWLTAFTWLGQQYCWTRLPQGFLNSPALFNADVVDLLKEVPNVQVYVDDIYISHDDPREHLEQLEKVFSLLLNAGYVVSLKKSEIAQHEVEFLGFNITKEGRGLTETFKQKLLNITPPRDLKQLQSILGKLNFARNFIPNFSELVKPLYNIIATAPGKYITWTTDNSQQLQNIISMLNSAENLEERNPEVRLIMKVNTSPSAGYIRFYNEFAKRPIMYLNYVYTKAEVKFTNTEKLLTTIHKGLIKALDLGMGQEILVYSPIVSMTKIQKTPLPERKALPIRWITWMSYLEDPRIQFHYDKTLPELQQVPTVTDDIIAKIKHPSEFSMVFYTDGSAIKHPNVNKSHNAGMGIAQVQFKPEFTVINTWSIPLGDHTAQLAEVAAVEFACKKALKIDGPVLIVTDSFYVAESVNKELPYWQSNGFFNNKKKPLKHVSKWKSIADCIQLKPDIIIIHEKGHQPTASTFHTEGNNLADKLATQGSYVVNAGKRTADGSEFEKRTADGSEFESPKKKAKVE

SEQ ID NO: 7008 - protein, 2092 aa, synthetic construct
MPAAKRVKLDGGDKKYSIGLDIGTNSVGWAVITDEYKVPSKKFKVLGNTDRHSIKKNLIGALLFDSGETAEATRLKRTARRRYTRRKNRICYLQEIFSNEMAKVDDSFFHRLEESFLVEEDKKHERHPIFGNIVDEVAYHEKYPTIYHLRKKLVDSTDKADLRLIYLALAHMIKFRGHFLIEGDLNPDNSDVDKLFIQLVQTYNQLFEENPINASGVDAKAILSARLSKSRRLENLIAQLPGEKKNGLFGNLIALSLGLTPNFKSNFDLAEDAKLQLSKDTYDDDLDNLLAQIGDQYADLFLAAKNLSDAILLSDILRVNTEITKAPLSASMIKRYDEHHQDLTLLKALVRQQLPEKYKEIFFDQSKNGYAGYIDGGASQEEFYKFIKPILEKMDGTEELLVKLNREDLLRKQRTFDNGSIPHQIHLGELHAILRRQEDFYPFLKDNREKIEKILTFRIPYYVGPLARGNSRFAWMTRKSEETITPWNFEEVVDKGASAQSFIERMTNFDKNLPNEKVLPKHSLLYEYFTVYNELTKVKYVTEGMRKPAFLSGEQKKAIVDLLFKTNRKVTVKQLKEDYFKKIECFDSVEISGVEDRFNASLGTYHDLLKIIKDKDFLDNEENEDILEDIVLTLTLFEDREMIEERLKTYAHLFDDKVMKQLKRRRYTGWGRLSRKLINGIRDKQSGKTILDFLKSDGFANRNFMQLIHDDSLTFKEDIQKAQVSGQGDSLHEHIANLAGSPAIKKGILQTVKVVDELVKVMGRHKPENIVIEMARENQTTQKGQKNSRERMKRIEEGIKELGSQILKEHPVENTQLQNEKLYLYYLQNGRDMYVDQELDINRLSDYDVDHIVPQSFLKDDSIDNKVLTRSDKARGKSDNVPSEEVVKKMKNYWRQLLNAKLITQRKFDNLTKAERGGLSELDKAGFIKRQLVETRQITKHVAQILDSRMNTKYDENDKLIREVKVITLKSKLVSDFRKDFQFYKVREINNYHHAHDAYLNAVVGTALIKKYPKLESEFVYGDYKVYDVRKMIAKSEQEIGKATAKYFFYSNIMNFFKTEITLANGEIRKRPLIETNGETGEIVWDKGRDFATVRKVLSMPQVNIVKKTEVQTGGFSKESILPKRNSDKLIARKKDWDPKKYGGFDSPTVAYSVLVVAKVEKGKSKKLKSVKELLGITIMERSSFEKNPIDFLEAKGYKEVKKDLIIKLPKYSLFELENGRKRMLASAGELQKGNELALPSKYVNFLYLASHYEKLKGSPEDNEQKQLFVEQHKHYLDEIIEQISEFSKRVILADANLDKVLSAYNKHRDKPIREQAENIIHLFTLTNLGAPAAFKYFDTTIDRKRYTSTKEVLDATLIHQSITGLYETRIDLSQLGGDGGGGGGGSPAPGGVLNLEEEYRLHEKPVPSSIDPSWLQLFPTVWAERAGMGLANQVPPVVVELRSGASPVAVRQYPMSKEAREGIRPHIQRFLDLGVLVPCQSPWNTPLLPVKKPGTNDYRPVQDLREINKRVQDIHPTVPNPYNLLSSLPPSHTWYSVLDLKDAFFCLKLHPNSQPLFAFEWRDPEKGNTGQLTWTRLPQGFKNSPTLFNEALHRDLAPFRALNPQVVLLQYVDDLLVAAPTYRDCKEGTQKLLQELSKLGYRVSAKKAQLCQKEVTYLGYLLKEGKRWLTPARKATVMKIPPPTTPRQVREFLGKAGFCRLFIPGFASLAAPLYPLTKPSIPFIWTEEHQKAFDRIKEALLSAPALALPDLTKPFTLYVDERAGVARGVLTQTLGPWRRPVAYLSKKLDPVASGWPTCLKAVAAVALLLKDADKLTLGQNVTVIASHSLESIVRQPPDRWMTNARMTHYQSLLLNERVSFAPPAVLNPATLLPVESEATPVHRCSEILAEETGTRRDLKDQPLPGVPAWYTDGSSFIAEGKRRAGAAIVDGKRTVWASSLPEGTSAQKAELVALTQALRLAEGKDINIYTDSRYAFATAHIHGAIYKQRGWLTSAGKDIKNKEEILALLEAIHLPKRVAIIHCPGHQKGNDPVATGNRRADEAAKQAALSTRVLAETTKPAGKRTADGSEFEKRTADGSEFESPKKKAKVE

SEQ ID NO: 7009 - protein, 2096 aa, synthetic construct
MPAAKRVKLDGGDKKYSIGLDIGTNSVGWAVITDEYKVPSKKFKVLGNTDRHSIKKNLIGALLFDSGETAEATRLKRTARRRYTRRKNRICYLQEIFSNEMAKVDDSFFHRLEESFLVEEDKKHERHPIFGNIVDEVAYHEKYPTIYHLRKKLVDSTDKADLRLIYLALAHMIKFRGHFLIEGDLNPDNSDVDKLFIQLVQTYNQLFEENPINASGVDAKAILSARLSKSRRLENLIAQLPGEKKNGLFGNLIALSLGLTPNFKSNFDLAEDAKLQLSKDTYDDDLDNLLAQIGDQYADLFLAAKNLSDAILLSDILRVNTEITKAPLSASMIKRYDEHHQDLTLLKALVRQQLPEKYKEIFFDQSKNGYAGYIDGGASQEEFYKFIKPILEKMDGTEELLVKLNREDLLRKQRTFDNGSIPHQIHLGELHAILRRQEDFYPFLKDNREKIEKILTFRIPYYVGPLARGNSRFAWMTRKSEETITPWNFEEVVDKGASAQSFIERMTNFDKNLPNEKVLPKHSLLYEYFTVYNELTKVKYVTEGMRKPAFLSGEQKKAIVDLLFKTNRKVTVKQLKEDYFKKIECFDSVEISGVEDRFNASLGTYHDLLKIIKDKDFLDNEENEDILEDIVLTLTLFEDREMIEERLKTYAHLFDDKVMKQLKRRRYTGWGRLSRKLINGIRDKQSGKTILDFLKSDGFANRNFMQLIHDDSLTFKEDIQKAQVSGQGDSLHEHIANLAGSPAIKKGILQTVKVVDELVKVMGRHKPENIVIEMARENQTTQKGQKNSRERMKRIEEGIKELGSQILKEHPVENTQLQNEKLYLYYLQNGRDMYVDQELDINRLSDYDVDHIVPQSFLKDDSIDNKVLTRSDKARGKSDNVPSEEVVKKMKNYWRQLLNAKLITQRKFDNLTKAERGGLSELDKAGFIKRQLVETRQITKHVAQILDSRMNTKYDENDKLIREVKVITLKSKLVSDFRKDFQFYKVREINNYHHAHDAYLNAVVGTALIKKYPKLESEFVYGDYKVYDVRKMIAKSEQEIGKATAKYFFYSNIMNFFKTEITLANGEIRKRPLIETNGETGEIVWDKGRDFATVRKVLSMPQVNIVKKTEVQTGGFSKESILPKRNSDKLIARKKDWDPKKYGGFDSPTVAYSVLVVAKVEKGKSKKLKSVKELLGITIMERSSFEKNPIDFLEAKGYKEVKKDLIIKLPKYSLFELENGRKRMLASAGELQKGNELALPSKYVNFLYLASHYEKLKGSPEDNEQKQLFVEQHKHYLDEIIEQISEFSKRVILADANLDKVLSAYNKHRDKPIREQAENIIHLFTLTNLGAPAAFKYFDTTIDRKRYTSTKEVLDATLIHQSITGLYETRIDLSQLGGDGGGGGPAPGGSGGTAPLEEEYRLFLEAPIQNVTLLEQWKREIPKVWAEINPPGLASTQAPIHVQLLSTALPVRVRQYPITLEAKRSLRETIRKFRAAGILRPVHSPWNTPLLPVRKSGTSEYRMVQDLREVNKRVETIHPTVPNPYTLLSLLPPDRIWYSVLDLKDAFFCIPLAPESQLIFAFEWADAEEGESGQLTWTRLPQGFKNSPTLFNEALNRDLQGFRLDHPSVSLLQYVDDLLIAADTQAACLSATRDLLMTLAELGYRVSGKKAQLCQEEVTYLGFKIHKGSRSLSNSRTQAILQIPVPKTKRQVREFLGTIGYCRLWIPGFAELAQPLYAATRPGNDPLVWGEKEEEAFQSLKLALTQPPALALPSLDKPFQLFVEETSGAAKGVLTQALGPWKRPVAYLSKRLDPVAAGWPRCLRAIAAAALLTREASKLTFGQDIEITSSHNLESLLRSPPDKWLTNARITQYQVLLLDPPRVRFKQTAALNPATLLPETDDTLPIHHCLDTLDSLTSTRPDLTDQPLAQAEATLFTDGSSYIRDGKRYAGAAVVTLDSVIWAEPLPIGTSAQKAELIALTKALEWSKDKSVNIYTDSRYAFATLHVHGMIYRERGWLTAGGKAIKNAPEILALLTAVWLPKRVAVMHCKGHQKDDAPTSTGNRRADEVAREVAIRPLSTQATISAGKRTADGSEFEKRTADGSEFESPKKKAKVE

SEQ ID NO: 7010 - protein, 2216 aa, synthetic construct
MPAAKRVKLDGGDKKYSIGLDIGTNSVGWAVITDEYKVPSKKFKVLGNTDRHSIKKNLIGALLFDSGETAEATRLKRTARRRYTRRKNRICYLQEIFSNEMAKVDDSFFHRLEESFLVEEDKKHERHPIFGNIVDEVAYHEKYPTIYHLRKKLVDSTDKADLRLIYLALAHMIKFRGHFLIEGDLNPDNSDVDKLFIQLVQTYNQLFEENPINASGVDAKAILSARLSKSRRLENLIAQLPGEKKNGLFGNLIALSLGLTPNFKSNFDLAEDAKLQLSKDTYDDDLDNLLAQIGDQYADLFLAAKNLSDAILLSDILRVNTEITKAPLSASMIKRYDEHHQDLTLLKALVRQQLPEKYKEIFFDQSKNGYAGYIDGGASQEEFYKFIKPILEKMDGTEELLVKLNREDLLRKQRTFDNGSIPHQIHLGELHAILRRQEDFYPFLKDNREKIEKILTFRIPYYVGPLARGNSRFAWMTRKSEETITPWNFEEVVDKGASAQSFIERMTNFDKNLPNEKVLPKHSLLYEYFTVYNELTKVKYVTEGMRKPAFLSGEQKKAIVDLLFKTNRKVTVKQLKEDYFKKIECFDSVEISGVEDRFNASLGTYHDLLKIIKDKDFLDNEENEDILEDIVLTLTLFEDREMIEERLKTYAHLFDDKVMKQLKRRRYTGWGRLSRKLINGIRDKQSGKTILDFLKSDGFANRNFMQLIHDDSLTFKEDIQKAQVSGQGDSLHEHIANLAGSPAIKKGILQTVKVVDELVKVMGRHKPENIVIEMARENQTTQKGQKNSRERMKRIEEGIKELGSQILKEHPVENTQLQNEKLYLYYLQNGRDMYVDQELDINRLSDYDVDHIVPQSFLKDDSIDNKVLTRSDKARGKSDNVPSEEVVKKMKNYWRQLLNAKLITQRKFDNLTKAERGGLSELDKAGFIKRQLVETRQITKHVAQILDSRMNTKYDENDKLIREVKVITLKSKLVSDFRKDFQFYKVREINNYHHAHDAYLNAVVGTALIKKYPKLESEFVYGDYKVYDVRKMIAKSEQEIGKATAKYFFYSNIMNFFKTEITLANGEIRKRPLIETNGETGEIVWDKGRDFATVRKVLSMPQVNIVKKTEVQTGGFSKESILPKRNSDKLIARKKDWDPKKYGGFDSPTVAYSVLVVAKVEKGKSKKLKSVKELLGITIMERSSFEKNPIDFLEAKGYKEVKKDLIIKLPKYSLFELENGRKRMLASAGELQKGNELALPSKYVNFLYLASHYEKLKGSPEDNEQKQLFVEQHKHYLDEIIEQISEFSKRVILADANLDKVLSAYNKHRDKPIREQAENIIHLFTLTNLGAPAAFKYFDTTIDRKRYTSTKEVLDATLIHQSITGLYETRIDLSQLGGDGGGGGPAPGGSGGTLGDQGSRGSDPLPEPRVTLTVEGIPTEFLVNTGAEHSVLTKPMGKMGSKRTVVAGATGSKVYPWTTKRLLKIGQKQVTHSFLVIPECPAPLLGRDLLTKLKAQIQFSTEGPQVTWEDRPAMCLVLNLEEEYRLHEKPVPPSIDPSWLQLFPMVWAEKAGMGLANQVPPVVVELKSDASPVAVRQYPMSKEAREGIRPHIQRFLDLGILVPCQSPWNTPLLPVKKPGTNDYRPVQDLREVNKRVQDIHPTVPNPYNLLSSLPPSHTWYSVLDLKDAFFCLKLHPNSQPLFAFEWRDPEKGNTGQLTWTRLPQGFKNSPTLFDEALHRDLASFRALNPQVVMLQYVDDLLVAAPTYRDCKEGTRRLLQELSKLGYRVSAKKAQLCREEVTYLGYLLKGGKRWLTPARKATVMKIPTPTTPRQVREFLGTAGFCRLWIPGFASLAAPLYPLTREKVPFTWTEAHQEAFGRIKEALLSAPALALPDLTKPFALYVDEKEGVARGVLTQTLGPWRRPVAYLSKKLDPVASGWPTCLKAIAAVALLLKDADKLTLGQNVLVIAPHNLESIVRQPPDRWMTNARMTHYQSLLLNERVSFAPPAILNPATLLPVESDDTPIHICSEILAEETGTRPDLRDQPLPGVPAWYTDGSSFIMDGRRQAGAAIVDNKRTVWASNLPEGTSAQKAELIALTQALRLAEGKSINIYTDSRYAFATAHVHGAIYKQRGLLTSAGKDIKNKEEILALLEAIHLPKRVAIIHCPGHQRGTDPVATGNRKADEAAKQAAQSTRILTETTKNAGKRTADGSEFEKRTADGSEFESPKKKAKVE

SEQ ID NO: 7011 - protein, 2125 aa, synthetic construct
MPAAKRVKLDGGDKKYSIGLDIGTNSVGWAVITDEYKVPSKKFKVLGNTDRHSIKKNLIGALLFDSGETAEATRLKRTARRRYTRRKNRICYLQEIFSNEMAKVDDSFFHRLEESFLVEEDKKHERHPIFGNIVDEVAYHEKYPTIYHLRKKLVDSTDKADLRLIYLALAHMIKFRGHFLIEGDLNPDNSDVDKLFIQLVQTYNQLFEENPINASGVDAKAILSARLSKSRRLENLIAQLPGEKKNGLFGNLIALSLGLTPNFKSNFDLAEDAKLQLSKDTYDDDLDNLLAQIGDQYADLFLAAKNLSDAILLSDILRVNTEITKAPLSASMIKRYDEHHQDLTLLKALVRQQLPEKYKEIFFDQSKNGYAGYIDGGASQEEFYKFIKPILEKMDGTEELLVKLNREDLLRKQRTFDNGSIPHQIHLGELHAILRRQEDFYPFLKDNREKIEKILTFRIPYYVGPLARGNSRFAWMTRKSEETITPWNFEEVVDKGASAQSFIERMTNFDKNLPNEKVLPKHSLLYEYFTVYNELTKVKYVTEGMRKPAFLSGEQKKAIVDLLFKTNRKVTVKQLKEDYFKKIECFDSVEISGVEDRFNASLGTYHDLLKIIKDKDFLDNEENEDILEDIVLTLTLFEDREMIEERLKTYAHLFDDKVMKQLKRRRYTGWGRLSRKLINGIRDKQSGKTILDFLKSDGFANRNFMQLIHDDSLTFKEDIQKAQVSGQGDSLHEHIANLAGSPAIKKGILQTVKVVDELVKVMGRHKPENIVIEMARENQTTQKGQKNSRERMKRIEEGIKELGSQILKEHPVENTQLQNEKLYLYYLQNGRDMYVDQELDINRLSDYDVDHIVPQSFLKDDSIDNKVLTRSDKARGKSDNVPSEEVVKKMKNYWRQLLNAKLITQRKFDNLTKAERGGLSELDKAGFIKRQLVETRQITKHVAQILDSRMNTKYDENDKLIREVKVITLKSKLVSDFRKDFQFYKVREINNYHHAHDAYLNAVVGTALIKKYPKLESEFVYGDYKVYDVRKMIAKSEQEIGKATAKYFFYSNIMNFFKTEITLANGEIRKRPLIETNGETGEIVWDKGRDFATVRKVLSMPQVNIVKKTEVQTGGFSKESILPKRNSDKLIARKKDWDPKKYGGFDSPTVAYSVLVVAKVEKGKSKKLKSVKELLGITIMERSSFEKNPIDFLEAKGYKEVKKDLIIKLPKYSLFELENGRKRMLASAGELQKGNELALPSKYVNFLYLASHYEKLKGSPEDNEQKQLFVEQHKHYLDEIIEQISEFSKRVILADANLDKVLSAYNKHRDKPIREQAENIIHLFTLTNLGAPAAFKYFDTTIDRKRYTSTKEVLDATLIHQSITGLYETRIDLSQLGGDGGGGGPAPGGSGGLLGRDLLTKLKAQIQFSTEGPQVTWEDRPAMCLVLNLEEEYRLHEKPVPPSIDPSWLQLFPMVWAEKAGMGLANQVPPVVVELKSDASPVAVRQYPMSKEAREGIRPHIQRFLDLGILVPCQSPWNTPLLPVKKPGTNDYRPVQDLREVNKRVQDIHPTVPNPYNLLSSLPPSHTWYSVLDLKDAFFCLKLHPNSQPLFAFEWRDPEKGNTGQLTWTRLPQGFKNSPTLFNEALHRDLASFRALNPQVVMLQYVDDLLVAAPTYRDCKEGTRRLLQELSKLGYRVSAKKAQLCREEVTYLGYLLKGGKRWLTPARKATVMKIPTPTTPRQVREFLGTAGFCRLWIPGFASLAAPLYPLTRPKVPFTWTEAHQEAFGRIKEALLSAPALALPDLTKPFALYVDEKEGVARGVLTQTLGPWRRPVAYLSKKLDPVASGWPTCLKAIAAVALLLKDADKLTLGQNVLVIAPHNLESIVRQPPDRWMTNARMTHYQSLLLNERVSFAPPAILNPATLLPVESDDTPIHICSEILAEETGTRPDLRDQPLPGVPAWYTDGSSFIMDGRRQAGAAIVDNKRTVWASNLPEGTSAQKAELIALTQALRLAEGKSINIYTDSRYAFATAHVHGAIYKQRGWLTSAGKDIKNKEEILALLEAIHLPKRVAIIHCPGHQRGTDPVATGNRKADEAAKQAAQSTRILTETTKNAGKRTADGSEFEKRTADGSEFESPKKKAKVE

SEQ ID NO: 7012 - protein, 2094 aa, synthetic construct
MPAAKRVKLDGGDKKYSIGLDIGTNSVGWAVITDEYKVPSKKFKVLGNTDRHSIKKNLIGALLFDSGETAEATRLKRTARRRYTRRKNRICYLQEIFSNEMAKVDDSFFHRLEESFLVEEDKKHERHPIFGNIVDEVAYHEKYPTIYHLRKKLVDSTDKADLRLIYLALAHMIKFRGHFLIEGDLNPDNSDVDKLFIQLVQTYNQLFEENPINASGVDAKAILSARLSKSRRLENLIAQLPGEKKNGLFGNLIALSLGLTPNFKSNFDLAEDAKLQLSKDTYDDDLDNLLAQIGDQYADLFLAAKNLSDAILLSDILRVNTEITKAPLSASMIKRYDEHHQDLTLLKALVRQQLPEKYKEIFFDQSKNGYAGYIDGGASQEEFYKFIKPILEKMDGTEELLVKLNREDLLRKQRTFDNGSIPHQIHLGELHAILRRQEDFYPFLKDNREKIEKILTFRIPYYVGPLARGNSRFAWMTRKSEETITPWNFEEVVDKGASAQSFIERMTNFDKNLPNEKVLPKHSLLYEYFTVYNELTKVKYVTEGMRKPAFLSGEQKKAIVDLLFKTNRKVTVKQLKEDYFKKIECFDSVEISGVEDRFNASLGTYHDLLKIIKDKDFLDNEENEDILEDIVLTLTLFEDREMIEERLKTYAHLFDDKVMKQLKRRRYTGWGRLSRKLINGIRDKQSGKTILDFLKSDGFANRNFMQLIHDDSLTFKEDIQKAQVSGQGDSLHEHIANLAGSPAIKKGILQTVKVVDELVKVMGRHKPENIVIEMARENQTTQKGQKNSRERMKRIEEGIKELGSQILKEHPVENTQLQNEKLYLYYLQNGRDMYVDQELDINRLSDYDVDHIVPQSFLKDDSIDNKVLTRSDKARGKSDNVPSEEVVKKMKNYWRQLLNAKLITQRKFDNLTKAERGGLSELDKAGFIKRQLVETRQITKHVAQILDSRMNTKYDENDKLIREVKVITLKSKLVSDFRKDFQFYKVREINNYHHAHDAYLNAVVGTALIKKYPKLESEFVYGDYKVYDVRKMIAKSEQEIGKATAKYFFYSNIMNFFKTEITLANGEIRKRPLIETNGETGEIVWDKGRDFATVRKVLSMPQVNIVKKTEVQTGGFSKESILPKRNSDKLIARKKDWDPKKYGGFDSPTVAYSVLVVAKVEKGKSKKLKSVKELLGITIMERSSFEKNPIDFLEAKGYKEVKKDLIIKLPKYSLFELENGRKRMLASAGELQKGNELALPSKYVNFLYLASHYEKLKGSPEDNEQKQLFVEQHKHYLDEIIEQISEFSKRVILADANLDKVLSAYNKHRDKPIREQAENIIHLFTLTNLGAPAAFKYFDTTIDRKRYTSTKEVLDATLIHQSITGLYETRIDLSQLGGDGGGGGPAPGGSGGTLGIEDEYRLHETSTEPDVSLGSTWLSDFPQAWAETGGMGLAVRQAPLIIPLKATSTPVSIQQYPMSHEARLGIKPHIQRLLDQGILVPCQSPWNTPLLPVKKPGTNDYRPVQDLREVNKRVEDIHPTVPNPYNLLSGLPPSHQWYTVLDLKDAFFCLRLHPTSQPLFAFEWRDPGMGISGQLTWTRLPQGFKNSPTLFNEALHRDLADFRIQHPDLILLQYVDDILLAATSELDCQQGTRALLQTLGDLGYRASAKKAQICQKQVKYLGYLLREGQRWLTEARKETVMGQPVPKTPRQLREFLGTAGFCRLWIPGFAEMAAPLYPLTKPGTLFSWGPDQQKAYQEIKQALLTAPALGLPDLTKPFELFVDEKQGYAKGVLTQKLGPWRRPVAYLSKKLDPVAAGWPPCLRMVAAIAVLTKDAGKLTMGQPLVILAPHAVEALVKQPPDRWLSNARMTHYQAMLLDTDRVQFGPVVALNPATLLPLPEEGAPHDCLEILAETHGTRPDLTDQPIPDADHTWYTDGSSFLQEGQRKAGAAVTTETEVIWAGALPAGTSAQRAELIALTQALKMAEGKRLNVYTDSRYAFATAHIHGEIYRRRGWLTSEGREIKNKSEILALLKALFLPKRLSIIHCLGHQKGDSAEARGNRLADQAAREAAIKTPPDTSTLLAGKRTADGSEFEKRTADGSEFESPKKKAKVE

SEQ ID NO: 7013 - protein, 2086 aa, synthetic construct
MPAAKRVKLDGGDKKYSIGLDIGTNSVGWAVITDEYKVPSKKFKVLGNTDRHSIKKNLIGALLFDSGETAEATRLKRTARRRYTRRKNRICYLQEIFSNEMAKVDDSFFHRLEESFLVEEDKKHERHPIFGNIVDEVAYHEKYPTIYHLRKKLVDSTDKADLRLIYLALAHMIKFRGHFLIEGDLNPDNSDVDKLFIQLVQTYNQLFEENPINASGVDAKAILSARLSKSRRLENLIAQLPGEKKNGLFGNLIALSLGLTPNFKSNFDLAEDAKLQLSKDTYDDDLDNLLAQIGDQYADLFLAAKNLSDAILLSDILRVNTEITKAPLSASMIKRYDEHHQDLTLLKALVRQQLPEKYKEIFFDQSKNGYAGYIDGGASQEEFYKFIKPILEKMDGTEELLVKLNREDLLRKQRTFDNGSIPHQIHLGELHAILRRQEDFYPFLKDNREKIEKILTFRIPYYVGPLARGNSRFAWMTRKSEETITPWNFEEVVDKGASAQSFIERMTNFDKNLPNEKVLPKHSLLYEYFTVYNELTKVKYVTEGMRKPAFLSGEQKKAIVDLLFKTNRKVTVKQLKEDYFKKIECFDSVEISGVEDRFNASLGTYHDLLKIIKDKDFLDNEENEDILEDIVLTLTLFEDREMIEERLKTYAHLFDDKVMKQLKRRRYTGWGRLSRKLINGIRDKQSGKTILDFLKSDGFANRNFMQLIHDDSLTFKEDIQKAQVSGQGDSLHEHIANLAGSPAIKKGILQTVKVVDELVKVMGRHKPENIVIEMARENQTTQKGQKNSRERMKRIEEGIKELGSQILKEHPVENTQLQNEKLYLYYLQNGRDMYVDQELDINRLSDYDVDHIVPQSFLKDDSIDNKVLTRSDKARGKSDNVPSEEVVKKMKNYWRQLLNAKLITQRKFDNLTKAERGGLSELDKAGFIKRQLVETRQITKHVAQILDSRMNTKYDENDKLIREVKVITLKSKLVSDFRKDFQFYKVREINNYHHAHDAYLNAVVGTALIKKYPKLESEFVYGDYKVYDVRKMIAKSEQEIGKATAKYFFYSNIMNFFKTEITLANGEIRKRPLIETNGETGEIVWDKGRDFATVRKVLSMPQVNIVKKTEVQTGGFSKESILPKRNSDKLIARKKDWDPKKYGGFDSPTVAYSVLVVAKVEKGKSKKLKSVKELLGITIMERSSFEKNPIDFLEAKGYKEVKKDLIIKLPKYSLFELENGRKRMLASAGELQKGNELALPSKYVNFLYLASHYEKLKGSPEDNEQKQLFVEQHKHYLDEIIEQISEFSKRVILADANLDKVLSAYNKHRDKPIREQAENIIHLFTLTNLGAPAAFKYFDTTIDRKRYTSTKEVLDATLIHQSITGLYETRIDLSQLGGDGGGGGPAPGGSGGLDDEYRLYSPLVKPDQNIQFWLEQFPQAWAETAGMGLAKQVPPQVIQLKASATPVSVRQYPLSKEAQEGIRPHVQRLIQQGILVPVQSPWNTPLLPVRKPGTNDYRPVQDLREVNKRVQDIHPTVPNPYNLLCALPPQRSWYTVLDLKDAFFCLRLHPTSQPLFAFEWRDPGTGRTGQLTWTRLPQGFKNSPTIFNEALHRDLANFRIQHPQVTLLQYVDDLLLAGATKQDCLEGTKALLLELSDLGYRASAKKAQICRREVTYLGYSLRDGQRWLTEARKKTVVQIPAPTTAKQVREFLGKAGFCRLFIPGFATLAAPLYPLTKPKGEFSWAPEHQKAFDAIKKALLSAPALALPDVTKPFTLYVDERKGVARGVLTQTLGPWRRPVAYLSKKLDPVASGWPVCLKAIAAVAILVKDADKLTLGQNITVIAPHALENIVRQPPDRWMTNARMTHYQSLLLTERVTFAPPAALNPATLLPEETDEPVTHDCHQLLIEETGVRKDLTDIPLTGEVLTWFTDGSSYVVEGKRMAGAAVVDGTRTIWASSLPEGTSAQKAELMALTQALRLAEGKSINIYTDSRYAFATAHVHGAIYKQRGWLTSAGREIKNKEEILSLLEALHLPKRLAIIHCPGHQKAKDPISRGNQMADRVAKQAAQGVNLLPAGKRTADGSEFEKRTADGSEFESPKKKAKVE

SEQ ID NO: 7014 - protein, 2088 aa, synthetic construct
MPAAKRVKLDGGDKKYSIGLDIGTNSVGWAVITDEYKVPSKKFKVLGNTDRHSIKKNLIGALLFDSGETAEATRLKRTARRRYTRRKNRICYLQEIFSNEMAKVDDSFFHRLEESFLVEEDKKHERHPIFGNIVDEVAYHEKYPTIYHLRKKLVDSTDKADLRLIYLALAHMIKFRGHFLIEGDLNPDNSDVDKLFIQLVQTYNQLFEENPINASGVDAKAILSARLSKSRRLENLIAQLPGEKKNGLFGNLIALSLGLTPNFKSNFDLAEDAKLQLSKDTYDDDLDNLLAQIGDQYADLFLAAKNLSDAILLSDILRVNTEITKAPLSASMIKRYDEHHQDLTLLKALVRQQLPEKYKEIFFDQSKNGYAGYIDGGASQEEFYKFIKPILEKMDGTEELLVKLNREDLLRKQRTFDNGSIPHQIHLGELHAILRRQEDFYPFLKDNREKIEKILTFRIPYYVGPLARGNSRFAWMTRKSEETITPWNFEEVVDKGASAQSFIERMTNFDKNLPNEKVLPKHSLLYEYFTVYNELTKVKYVTEGMRKPAFLSGEQKKAIVDLLFKTNRKVTVKQLKEDYFKKIECFDSVEISGVEDRFNASLGTYHDLLKIIKDKDFLDNEENEDILEDIVLTLTLFEDREMIEERLKTYAHLFDDKVMKQLKRRRYTGWGRLSRKLINGIRDKQSGKTILDFLKSDGFANRNFMQLIHDDSLTFKEDIQKAQVSGQGDSLHEHIANLAGSPAIKKGILQTVKVVDELVKVMGRHKPENIVIEMARENQTTQKGQKNSRERMKRIEEGIKELGSQILKEHPVENTQLQNEKLYLYYLQNGRDMYVDQELDINRLSDYDVDHIVPQSFLKDDSIDNKVLTRSDKARGKSDNVPSEEVVKKMKNYWRQLLNAKLITQRKFDNLTKAERGGLSELDKAGFIKRQLVETRQITKHVAQILDSRMNTKYDENDKLIREVKVITLKSKLVSDFRKDFQFYKVREINNYHHAHDAYLNAVVGTALIKKYPKLESEFVYGDYKVYDVRKMIAKSEQEIGKATAKYFFYSNIMNFFKTEITLANGEIRKRPLIETNGETGEIVWDKGRDFATVRKVLSMPQVNIVKKTEVQTGGFSKESILPKRNSDKLIARKKDWDPKKYGGFDSPTVAYSVLVVAKVEKGKSKKLKSVKELLGITIMERSSFEKNPIDFLEAKGYKEVKKDLIIKLPKYSLFELENGRKRMLASAGELQKGNELALPSKYVNFLYLASHYEKLKGSPEDNEQKQLFVEQHKHYLDEIIEQISEFSKRVILADANLDKVLSAYNKHRDKPIREQAENIIHLFTLTNLGAPAAFKYFDTTIDRKRYTSTKEVLDATLIHQSITGLYETRIDLSQLGGDGGGGGPAPGGSGGTLQLDDEYRLYSPLVKPDQNIQFWLEQFPQAWAETAGMGLAKQVPPQVIQLKASATPVSVRQYPLSKEAQEGIRPHVQRLIQQGILVPVQSPWNTPLLPVRKPGTNDYRPVQDLREVNKRVQDIHPTVPNPYNLLCALPPQRSWYTVLDLKDAFFCLRLHPTSQPLFAFEWRDPGTGRTGQLTWTRLPQGFKNSPTIFDEALHRDLANFRIQHPQVTLLQYVDDLLLAGATKQDCLEGTKALLLELSDLGYRASAKKAQICRREVTYLGYSLRDGQRWLTEARKKTVVQIPAPTTAKQVREFLGTAGFCRLWIPGFATLAAPLYPLTKEKGEFSWAPEHQKAFDAIKKALLSAPALALPDVTKPFTLYVDERKGVARGVLTQTLGPWRRPVAYLSKKLDPVASGWPVCLKAIAAVAILVKDADKLTLGQNITVIAPHALENIVRQPPDRWMTNARMTHYQSLLLTERVTFAPPAALNPATLLPEETDEPVTHDCHQLLIEETGVRKDLTDIPLTGEVLTWFTDGSSYVVEGKRMAGAAVVDGTRTIWASSLPEGTSAQKAELMALTQALRLAEGKSINIYTDSRYAFATAHVHGAIYKQRGLLTSAGREIKNKEEILSLLEALHLPKRLAIIHCPGHQKAKDPISRGNQMADRVAKQAAQGVNLLAGKRTADGSEFEKRTADGSEFESPKKKAKVE

SEQ ID NO: 7015 - protein, 2086 aa, synthetic construct; identical to SEQ ID NO: 7013

SEQ ID NO: 7016 - protein, 2085 aa, synthetic construct
MPAAKRVKLDGGDKKYSIGLDIGTNSVGWAVITDEYKVPSKKFKVLGNTDRHSIKKNLIGALLFDSGETAEATRLKRTARRRYTRRKNRICYLQEIFSNEMAKVDDSFFHRLEESFLVEEDKKHERHPIFGNIVDEVAYHEKYPTIYHLRKKLVDSTDKADLRLIYLALAHMIKFRGHFLIEGDLNPDNSDVDKLFIQLVQTYNQLFEENPINASGVDAKAILSARLSKSRRLENLIAQLPGEKKNGLFGNLIALSLGLTPNFKSNFDLAEDAKLQLSKDTYDDDLDNLLAQIGDQYADLFLAAKNLSDAILLSDILRVNTEITKAPLSASMIKRYDEHHQDLTLLKALVRQQLPEKYKEIFFDQSKNGYAGYIDGGASQEEFYKFIKPILEKMDGTEELLVKLNREDLLRKQRTFDNGSIPHQIHLGELHAILRRQEDFYPFLKDNREKIEKILTFRIPYYVGPLARGNSRFAWMTRKSEETITPWNFEEVVDKGASAQSFIERMTNFDKNLPNEKVLPKHSLLYEYFTVYNELTKVKYVTEGMRKPAFLSGEQKKAIVDLLFKTNRKVTVKQLKEDYFKKIECFDSVEISGVEDRFNASLGTYHDLLKIIKDKDFLDNEENEDILEDIVLTLTLFEDREMIEERLKTYAHLFDDKVMKQLKRRRYTGWGRLSRKLINGIRDKQSGKTILDFLKSDGFANRNFMQLIHDDSLTFKEDIQKAQVSGQGDSLHEHIANLAGSPAIKKGILQTVKVVDELVKVMGRHKPENIVIEMARENQTTQKGQKNSRERMKRIEEGIKELGSQILKEHPVENTQLQNEKLYLYYLQNGRDMYVDQELDINRLSDYDVDHIVPQSFLKDDSIDNKVLTRSDKARGKSDNVPSEEVVKKMKNYWRQLLNAKLITQRKFDNLTKAERGGLSELDKAGFIKRQLVETRQITKHVAQILDSRMNTKYDENDKLIREVKVITLKSKLVSDFRKDFQFYKVREINNYHHAHDAYLNAVVGTALIKKYPKLESEFVYGDYKVYDVRKMIAKSEQEIGKATAKYFFYSNIMNFFKTEITLANGEIRKRPLIETNGETGEIVWDKGRDFATVRKVLSMPQVNIVKKTEVQTGGFSKESILPKRNSDKLIARKKDWDPKKYGGFDSPTVAYSVLVVAKVEKGKSKKLKSVKELLGITIMERSSFEKNPIDFLEAKGYKEVKKDLIIKLPKYSLFELENGRKRMLASAGELQKGNELALPSKYVNFLYLASHYEKLKGSPEDNEQKQLFVEQHKHYLDEIIEQISEFSKRVILADANLDKVLSAYNKHRDKPIREQAENIIHLFTLTNLGAPAAFKYFDTTIDRKRYTSTKEVLDATLIHQSITGLYETRIDLSQLGGDGGGGGPAPGGSGGIPWLMKKPLQLTTLVPLQEYEERLLKQTMLTGSYKEKLQSLFLKYDALWQHWENQVGHRRIKPHHIATGTVNPRPQKQYPINPKAKASIQTVINDLLKQGVLIQQNSIMNTPVYPVPKPDGKWRMVLDYREVNKTIPLIAAQNQHSAGILSSIFRGKYKTTLDLSNGFWAHSITPESYWLTAFTWLGQQYCWTRLPQGFLNSPALFNADVVDLLKEVPNVQVYVDDIYISHDDPREHLEQLEKVFSLLLNAGYVVSLKKSEIAQHEVEFLGFNITKEGRGLTETFKQKLLNITPPRDLKQLQSILGLLNFARNFIPNFSELVKPLYNIIATAPGKYITWTTDNSQQLQNIISMLNSAENLEERNPEVRLIMKVNTSPSAGYIRFYNEFAKRPIMYLNYVYTKAEVKFTNTEKLLTTIHKGLIKALDLGMGQEILVYSPIVSMTKIQKTPLPERKALPIRWITWMSYLEDPRIQFHYDKTLPELQQVPTVTDDIIAKIKHPSEFSMVFYTDGSAIKHPNVNKSHNAGMGIAQVQFKPEFTVINTWSIPLGDHTAQLAEVAAVEFACKKALKIDGPVLIVTDSFYVAESVNKELPYWQSNGFFNNKKKPLKHVSKWKSIADCIQLKPDIIIIHEKGHQPTASTFHTEGNNLADKLATQGSYVVNAGKRTADGSEFEKRTADGSEFESPKKKAKVE

SEQ ID NO: 7017 - protein, 2092 aa, synthetic construct
MPAAKRVKLDGGDKKYSIGLDIGTNSVGWAVITDEYKVPSKKFKVLGNTDRHSIKKNLIGALLFDSGETAEATRLKRTARRRYTRRKNRICYLQEIFSNEMAKVDDSFFHRLEESFLVEEDKKHERHPIFGNIVDEVAYHEKYPTIYHLRKKLVDSTDKADLRLIYLALAHMIKFRGHFLIEGDLNPDNSDVDKLFIQLVQTYNQLFEENPINASGVDAKAILSARLSKSRRLENLIAQLPGEKKNGLFGNLIALSLGLTPNFKSNFDLAEDAKLQLSKDTYDDDLDNLLAQIGDQYADLFLAAKNLSDAILLSDILRVNTEITKAPLSASMIKRYDEHHQDLTLLKALVRQQLPEKYKEIFFDQSKNGYAGYIDGGASQEEFYKFIKPILEKMDGTEELLVKLNREDLLRKQRTFDNGSIPHQIHLGELHAILRRQEDFYPFLKDNREKIEKILTFRIPYYVGPLARGNSRFAWMTRKSEETITPWNFEEVVDKGASAQSFIERMTNFDKNLPNEKVLPKHSLLYEYFTVYNELTKVKYVTEGMRKPAFLSGEQKKAIVDLLFKTNRKVTVKQLKEDYFKKIECFDSVEISGVEDRFNASLGTYHDLLKIIKDKDFLDNEENEDILEDIVLTLTLFEDREMIEERLKTYAHLFDDKVMKQLKRRRYTGWGRLSRKLINGIRDKQSGKTILDFLKSDGFANRNFMQLIHDDSLTFKEDIQKAQVSGQGDSLHEHIANLAGSPAIKKGILQTVKVVDELVKVMGRHKPENIVIEMARENQTTQKGQKNSRERMKRIEEGIKELGSQILKEHPVENTQLQNEKLYLYYLQNGRDMYVDQELDINRLSDYDVDHIVPQSFLKDDSIDNKVLTRSDKARGKSDNVPSEEVVKKMKNYWRQLLNAKLITQRKFDNLTKAERGGLSELDKAGFIKRQLVETRQITKHVAQILDSRMNTKYDENDKLIREVKVITLKSKLVSDFRKDFQFYKVREINNYHHAHDAYLNAVVGTALIKKYPKLESEFVYGDYKVYDVRKMIAKSEQEIGKATAKYFFYSNIMNFFKTEITLANGEIRKRPLIETNGETGEIVWDKGRDFATVRKVLSMPQVNIVKKTEVQTGGFSKESILPKRNSDKLIARKKDWDPKKYGGFDSPTVAYSVLVVAKVEKGKSKKLKSVKELLGITIMERSSFEKNPIDFLEAKGYKEVKKDLIIKLPKYSLFELENGRKRMLASAGELQKGNELALPSKYVNFLYLASHYEKLKGSPEDNEQKQLFVEQHKHYLDEIIEQISEFSKRVILADANLDKVLSAYNKHRDKPIREQAENIIHLFTLTNLGAPAAFKYFDTTIDRKRYTSTKEVLDATLIHQSITGLYETRIDLSQLGGDGGGGGPAPGGSGGVLNLEEEYRLHEKPVPSSIDPSWLQLFPTVWAERAGMGLANQVPPVVVELRSGASPVAVRQYPMSKEAREGIRPHIQRFLDLGVLVPCQSPWNTPLLPVKKPGTNDYRPVQDLREINKRVQDIHPTVPNPYNLLSSLPPSHTWYSVLDLKDAFFCLKLHPNSQPLFAFEWRDPEKGNTGQLTWTRLPQGFKNSPTLFNEALHRDLAPFRALNPQVVLLQYVDDLLVAAPTYRDCKEGTQKLLQELSKLGYRVSAKKAQLCQKEVTYLGYLLKEGKRWLTPARKATVMKIPPPTTPRQVREFLGTAGFCRLWIPGFASLAAPLYPLTKPSIPFIWTEEHQKAFDRIKEALLSAPALALPDLTKPFTLYVDERAGVARGVLTQTLGPWRRPVAYLSKKLDPVASGWPTCLKAVAAVALLLKDADKLTLGQNVTVIASHSLESIVRQPPDRWMTNARMTHYQSLLLNERVSFAPPAVLNPATLLPVESEATPVHRCSEILAEETGTRRDLKDQPLPGVPAWYTDGSSFIAEGKRRAGAAIVDGKRTVWASSLPEGTSAQKAELVALTQALRLAEGKDINIYTDSRYAFATAHIHGAIYKQRGWLTSAGKDIKNKEEILALLEAIHLPKRVAIIHCPGHQKGNDPVATGNRRADEAAKQAALSTRVLAETTKPAGKRTADGSEFEKRTADGSEFESPKKKAKVE

SEQ ID NO: 7018 - protein, 2096 aa, synthetic construct
MPAAKRVKLDGGDKKYSIGLDIGTNSVGWAVITDEYKVPSKKFKVLGNTDRHSIKKNLIGALLFDSGETAEATRLKRTARRRYTRRKNRICYLQEIFSNEMAKVDDSFFHRLEESFLVEEDKKHERHPIFGNIVDEVAYHEKYPTIYHLRKKLVDSTDKADLRLIYLALAHMIKFRGHFLIEGDLNPDNSDVDKLFIQLVQTYNQLFEENPINASGVDAKAILSARLSKSRRLENLIAQLPGEKKNGLFGNLIALSLGLTPNFKSNFDLAEDAKLQLSKDTYDDDLDNLLAQIGDQYADLFLAAKNLSDAILLSDILRVNTEITKAPLSASMIKRYDEHHQDLTLLKALVRQQLPEKYKEIFFDQSKNGYAGYIDGGASQEEFYKFIKPILEKMDGTEELLVKLNREDLLRKQRTFDNGSIPHQIHLGELHAILRRQEDFYPFLKDNREKIEKILTFRIPYYVGPLARGNSRFAWMTRKSEETITPWNFEEVVDKGASAQSFIERMTNFDKNLPNEKVLPKHSLLYEYFTVYNELTKVKYVTEGMRKPAFLSGEQKKAIVDLLFKTNRKVTVKQLKEDYFKKIECFDSVEISGVEDRFNASLGTYHDLLKIIKDKDFLDNEENEDILEDIVLTLTLFEDREMIEERLKTYAHLFDDKVMKQLKRRRYTGWGRLSRKLINGIRDKQSGKTILDFLKSDGFANRNFMQLIHDDSLTFKEDIQKAQVSGQGDSLHEHIANLAGSPAIKKGILQTVKVVDELVKVMGRHKPENIVIEMARENQTTQKGQKNSRERMKRIEEGIKELGSQILKEHPVENTQLQNEKLYLYYLQNGRDMYVDQELDINRLSDYDVDHIVPQSFLKDDSIDNKVLTRSDKARGKSDNVPSEEVVKKMKNYWRQLLNAKLITQRKFDNLTKAERGGLSELDKAGFIKRQLVETRQITKHVAQILDSRMNTKYDENDKLIREVKVITLKSKLVSDFRKDFQFYKVREINNYHHAHDAYLNAVVGTALIKKYPKLESEFVYGDYKVYDVRKMIAKSEQEIGKATAKYFFYSNIMNFFKTEITLANGEIRKRPLIETNGETGEIVWDKGRDFATVRKVLSMPQVNIVKKTEVQTGGFSKESILPKRNSDKLIARKKDWDPKKYGGFDSPTVAYSVLVVAKVEKGKSKKLKSVKELLGITIMERSSFEKNPIDFLEAKGYKEVKKDLIIKLPKYSLFELENGRKRMLASAGELQKGNELALPSKYVNFLYLASHYEKLKGSPEDNEQKQLFVEQHKHYLDEIIEQISEFSKRVILADANLDKVLSAYNKHRDKPIREQAENIIHLFTLTNLGAPAAFKYFDTTIDRKRYTSTKEVLDATLIHQSITGLYETRIDLSQLGGDGGPAPGGSGGGGGTAPLEEEYRLFLEAPIQNVTLLEQWKREIPKVWAEINPPGLASTQAPIHVQLLSTALPVRVRQYPITLEAKRSLRETIRKFRAAGILRPVHSPWNTPLLPVRKSGTSEYRMVQDLREVNKRVETIHPTVPNPYTLLSLLPPDRIWYSVLDLKDAFFCIPLAPESQLIFAFEWADAEEGESGQLTWTRLPQGFKNSPTLFNEALNRDLQGFRLDHPSVSLLQYVDDLLIAADTQAACLSATRDLLMTLAELGYRVSGKKAQLCQEEVTYLGFKIHKGSRSLSNSRTQAILQIPVPKTKRQVREFLGTIGYCRLWIPGFAELAQPLYAATRPGNDPLVWGEKEEEAFQSLKLALTQPPALALPSLDKPFQLFVEETSGAAKGVLTQALGPWKRPVAYLSKRLDPVAAGWPRCLRAIAAAALLTREASKLTFGQDIEITSSHNLESLLRSPPDKWLTNARITQYQVLLLDPPRVRFKQTAALNPATLLPETDDTLPIHHCLDTLDSLTSTRPDLTDQPLAQAEATLFTDGSSYIRDGKRYAGAAVVTLDSVIWAEPLPIGTSAQKAELIALTKALEWSKDKSVNIYTDSRYAFATLHVHGMIYRERGWLTAGGKAIKNAPEILALLTAVWLPKRVAVMHCKGHQKDDAPTSTGNRRADEVAREVAIRPLSTQATISAGKRTADGSEFEKRTADGSEFESPKKKAKVE

SEQ ID NO: 7019 - protein, 2092 aa, synthetic construct
MPAAKRVKLDGGDKKYSIGLDIGTNSVGWAVITDEYKVPSKKFKVLGNTDRHSIKKNLIGALLFDSGETAEATRLKRTARRRYTRRKNRICYLQEIFSNEMAKVDDSFFHRLEESFLVEEDKKHERHPIFGNIVDEVAYHEKYPTIYHLRKKLVDSTDKADLRLIYLALAHMIKFRGHFLIEGDLNPDNSDVDKLFIQLVQTYNQLFEENPINASGVDAKAILSARLSKSRRLENLIAQLPGEKKNGLFGNLIALSLGLTPNFKSNFDLAEDAKLQLSKDTYDDDLDNLLAQIGDQYADLFLAAKNLSDAILLSDILRVNTEITKAPLSASMIKRYDEHHQDLTLLKALVRQQLPEKYKEIFFDQSKNGYAGYIDGGASQEEFYKFIKPILEKMDGTEELLVKLNREDLLRKQRTFDNGSIPHQIHLGELHAILRRQEDFYPFLKDNREKIEKILTFRIPYYVGPLARGNSRFAWMTRKSEETITPWNFEEVVDKGASAQSFIERMTNFDKNLPNEKVLPKHSLLYEYFTVYNELTKVKYVTEGMRKPAFLSGEQKKAIVDLLFKTNRKVTVKQLKEDYFKKIECFDSVEISGVEDRFNASLGTYHDLLKIIKDKDFLDNEENEDILEDIVLTLTLFEDREMIEERLKTYAHLFDDKVMKQLKRRRYTGWGRLSRKLINGIRDKQSGKTILDFLKSDGFANRNFMQLIHDDSLTFKEDIQKAQVSGQGDSLHEHIANLAGSPAIKKGILQTVKVVDELVKVMGRHKPENIVIEMARENQTTQKGQKNSRERMKRIEEGIKELGSQILKEHPVENTQLQNEKLYLYYLQNGRDMYVDQELDINRLSDYDVDHIVPQSFLKDDSIDNKVLTRSDKARGKSDNVPSEEVVKKMKNYWRQLLNAKLITQRKFDNLTKAERGGLSELDKAGFIKRQLVETRQITKHVAQILDSRMNTKYDENDKLIREVKVITLKSKLVSDFRKDFQFYKVREINNYHHAHDAYLNAVVGTALIKKYPKLESEFVYGDYKVYDVRKMIAKSEQEIGKATAKYFFYSNIMNFFKTEITLANGEIRKRPLIETNGETGEIVWDKGRDFATVRKVLSMPQVNIVKKTEVQTGGFSKESILPKRNSDKLIARKKDWDPKKYGGFDSPTVAYSVLVVAKVEKGKSKKLKSVKELLGITIMERSSFEKNPIDFLEAKGYKEVKKDLIIKLPKYSLFELENGRKRMLASAGELQKGNELALPSKYVNFLYLASHYEKLKGSPEDNEQKQLFVEQHKHYLDEIIEQISEFSKRVILADANLDKVLSAYNKHRDKPIREQAENIIHLFTLTNLGAPAAFKYFDTTIDRKRYTSTKEVLDATLIHQSITGLYETRIDLSQLGGDGGPAPGGSGGGGGVLNLEEEYRLHEKPVPSSIDPSWLQLFPTVWAERAGMGLANQVPPVVVELRSGASPVAVRQYPMSKEAREGIRPHIQKFLDLGVLVPCRSPWNTPLLPVKKPGTNDYRPVQDLREINKRVQDIHPTVPNPYNLLSSLPPSYTWYSVLDLKDAFFCLRLHPNSQPLFAFEWKDPEKGNTGQLTWTRLPQGFKNSPTLFNEALHRDLAPFRALNPQVVLLQYVDDLLVAAPTYEDCKKGTQKLLQELSKLGYRVSAKKAQLCQREVTYLGYLLKEGKRWLTPARKATVMKIPVPTTPRQVREFLGKAGFCRLFIPGFASLAAPLYPLTKPSIPFIWTEEHQQAFDHIKKALLSAPALALPDLTKPFTLYIDERAGVARGVLTQTLGPWRRPVAYLSKKLDPVASGWPTCLKAVAAVALLLKDADKLTLGQNVTVIASHSLESIVRQPPDRWMTNARMTHYQSLLLNERVSFAPPAVLNPATLLPVESEATPVHRCSEILAEETGTRRDLEDQPLPGVPTWYTDGSSFITEGKRRAGAPIVDGKRTVWASSLPEGTSAQKAELVALTQALRLAEGKNINIYTDSRYAFATAHIHGAIYKQRGWLTSAGKDIKNKEEILALLEAIHLPRRVAIIHCPGHQRGSNPVATGNRRADEAAKQAALSTRVLAGTTKPAGKRTADGSEFEKRTADGSEFESPKKKAKVE

SEQ ID NO: 7020 - protein, 2094 aa, synthetic construct
MPAAKRVKLDGGDKKYSIGLDIGTNSVGWAVITDEYKVPSKKFKVLGNTDRHSIKKNLIGALLFDSGETAEATRLKRTARRRYTRRKNRICYLQEIFSNEMAKVDDSFFHRLEESFLVEEDKKHERHPIFGNIVDEVAYHEKYPTIYHLRKKLVDSTDKADLRLIYLALAHMIKFRGHFLIEGDLNPDNSDVDKLFIQLVQTYNQLFEENPINASGVDAKAILSARLSKSRRLENLIAQLPGEKKNGLFGNLIALSLGLTPNFKSNFDLAEDAKLQLSKDTYDDDLDNLLAQIGDQYADLFLAAKNLSDAILLSDILRVNTEITKAPLSASMIKRYDEHHQDLTLLKALVRQQLPEKYKEIFFDQSKNGYAGYIDGGASQEEFYKFIKPILEKMDGTEELLVKLNREDLLRKQRTFDNGSIPHQIHLGELHAILRRQEDFYPFLKDNREKIEKILTFRIPYYVGPLARGNSRFAWMTRKSEETITPWNFEEVVDKGASAQSFIERMTNFDKNLPNEKVLPKHSLLYEYFTVYNELTKVKYVTEGMRKPAFLSGEQKKAIVDLLFKTNRKVTVKQLKEDYFKKIECFDSVEISGVEDRFNASLGTYHDLLKIIKDKDFLDNEENEDILEDIVLTLTLFEDREMIEERLKTYAHLFDDKVMKQLKRRRYTGWGRLSRKLINGIRDKQSGKTILDFLKSDGFANRNFMQLIHDDSLTFKEDIQKAQVSGQGDSLHEHIANLAGSPAIKKGILQTVKVVDELVKVMGRHKPENIVIEMARENQTTQKGQKNSRERMKRIEEGIKELGSQILKEHPVENTQLQNEKLYLYYLQNGRDMYVDQELDINRLSDYDVDHIVPQSFLKDDSIDNKVLTRSDKARGKSDNVPSEEVVKKMKNYWRQLLNAKLITQRKFDNLTKAERGGLSELDKAGFIKRQLVETRQITKHVAQILDSRMNTKYDENDKLIREVKVITLKSKLVSDFRKDFQFYKVREINNYHHAHDAYLNAVVGTALIKKYPKLESEFVYGDYKVYDVRKMIAKSEQEIGKATAKYFFYSNIMNFFKTEITLANGEIRKRPLIETNGETGEIVWDKGRDFATVRKVLSMPQVNIVKKTEVQTGGFSKESILPKRNSDKLIARKKDWDPKKYGGFDSPTVAYSVLVVAKVEKGKSKKLKSVKELLGITIMERSSFEKNPIDFLEAKGYKEVKKDLIIKLPKYSLFELENGRKRMLASAGELQKGNELALPSKYVNFLYLASHYEKLKGSPEDNEQKQLFVEQHKHYLDEIIEQISEFSKRVILADANLDKVLSAYNKHRDKPIREQAENIIHLFTLTNLGAPAAFKYFDTTIDRKRYTSTKEVLDATLIHQSITGLYETRIDLSQLGGDGGPAPGGSGGGGGTLNLEDEYRLYETSAEPEVSPGSTWLSDFPQAWAETGGMGLAVRQAPLIIPLKATSTPVSIKQYPMSQEAKLGIKPHIQRLLDQGILVPCQSPWNTPLLPVKKPGTNDYRPVQDLREVNKRVEDIHPTVPNPYNLLSGLPPSHRWYTVLDLKDAFFCLRLHPTSQPLFAFEWRDPGMGISGQLTWTRLPQGFKNSPTLFNEALHRDLADFRIQHPDLILLQYVDDILLAATSELDCQQGTRALLLTLGNLGYRASAKKAQLCQKQVKYLGYLLKEGQRWLTEARKETVMGQPTPKTPRQLREFLGKAGFCRLFIPGFAEMAAPLYPLTKPGTLFNWGPDQQKAYQEIKQALLTAPALGLPDLTKPFELFVDEKQGYAKGVLTQKLGPWRRPVAYLSKKLDPVAAGWPPCLRMVAAIAVLRKDAGKLTMGQPLVILAPHAVEALVKQPPDRWLSNARMTHYQAMLLDTDRVQFGPVVALNPATLLPLPEEGAPHDCLEILAETHGTRPDLTDQPIPDADHTWYTDGSSFLQEGQRKAGAAVTTETEVIWARALPAGTSAQRAELIALTQALKMAEGKRLNVYTDSRYAFATAHIHGEIYRRRGWLTSEGREIKNKSEILALLKALFLPKRLSIIHCLGHQKGDSAEARGNRLADQAAREAAIKTPPDTSTLLAGKRTADGSEFEKRTADGSEFESPKKKAKVE

SEQ ID NO: 7021 - protein, 2094 aa, synthetic construct
MPAAKRVKLDGGDKKYSIGLDIGTNSVGWAVITDEYKVPSKKFKVLGNTDRHSIKKNLIGALLFDSGETAEATRLKRTARRRYTRRKNRICYLQEIFSNEMAKVDDSFFHRLEESFLVEEDKKHERHPIFGNIVDEVAYHEKYPTIYHLRKKLVDSTDKADLRLIYLALAHMIKFRGHFLIEGDLNPDNSDVDKLFIQLVQTYNQLFEENPINASGVDAKAILSARLSKSRRLENLIAQLPGEKKNGLFGNLIALSLGLTPNFKSNFDLAEDAKLQLSKDTYDDDLDNLLAQIGDQYADLFLAAKNLSDAILLSDILRVNTEITKAPLSASMIKRYDEHHQDLTLLKALVRQQLPEKYKEIFFDQSKNGYAGYIDGGASQEEFYKFIKPILEKMDGTEELLVKLNREDLLRKQRTFDNGSIPHQIHLGELHAILRRQEDFYPFLKDNREKIEKILTFRIPYYVGPLARGNSRFAWMTRKSEETITPWNFEEVVDKGASAQSFIERMTNFDKNLPNEKVLPKHSLLYEYFTVYNELTKVKYVTEGMRKPAFLSGEQKKAIVDLLFKTNRKVTVKQLKEDYFKKIECFDSVEISGVEDRFNASLGTYHDLLKIIKDKDFLDNEENEDILEDIVLTLTLFEDREMIEERLKTYAHLFDDKVMKQLKRRRYTGWGRLSRKLINGIRDKQSGKTILDFLKSDGFANRNFMQLIHDDSLTFKEDIQKAQVSGQGDSLHEHIANLAGSPAIKKGILQTVKVVDELVKVMGRHKPENIVIEMARENQTTQKGQKNSRERMKRIEEGIKELGSQILKEHPVENTQLQNEKLYLYYLQNGRDMYVDQELDINRLSDYDVDHIVPQSFLKDDSIDNKVLTRSDKARGKSDNVPSEEVVKKMKNYWRQLLNAKLITQRKFDNLTKAERGGLSELDKAGFIKRQLVETRQITKHVAQILDSRMNTKYDENDKLIREVKVITLKSKLVSDFRKDFQFYKVREINNYHHAHDAYLNAVVGTALIKKYPKLESEFVYGDYKVYDVRKMIAKSEQEIGKATAKYFFYSNIMNFFKTEITLANGEIRKRPLIETNGETGEIVWDKGRDFATVRKVLSMPQVNIVKKTEVQTGGFSKESILPKRNSDKLIARKKDWDPKKYGGFDSPTVAYSVLVVAKVEKGKSKKLKSVKELLGITIMERSSFEKNPIDFLEAKGYKEVKKDLIIKLPKYSLFELENGRKRMLASAGELQKGNELALPSKYVNFLYLASHYEKLKGSPEDNEQKQLFVEQHKHYLDEIIEQISEFSKRVILADANLDKVLSAYNKHRDKPIREQAENIIHLFTLTNLGAPAAFKYFDTTIDRKRYTSTKEVLDATLIHQSITGLYETRIDLSQLGGDGGPAPGGSGGGGGTLGIEDEYRLHETSTEPDVSLGSTWLSDFPQAWAETGGMGLAVRQAPLIIPLKATSTPVSIQQYPMSHEARLGIKPHIQRLLDQGILVPCQSPWNTPLLPVKKPGTNDYRPVQDLREVNKRVEDIHPTVPNPYNLLSGLPPSHQWYTVLDLKDAFFCLRLHPTSQPLFAFEWRDPGMGISGQLTWTRLPQGFKNSPTLFDEALHRDLADFRIQHPDLILLQYVDDILLAATSELDCQQGTRALLQTLGDLGYRASAKKAQICQKQVKYLGYLLREGQRWLTEARKETVMGQPVPKTPRQLREFLGTAGFCRLWIPGFAEMAAPLYPLTKTGTLFSWGPDQQKAYQEIKQALLTAPALGLPDLTKPFELFVDEKQGYAKGVLTQKLGPWRRPVAYLSKKLDPVAAGWPPCLRMVAAIAVLTKDAGKLTMGQPLVILAPHAVEALVKQPPDRWLSNARMTHYQAMLLDTDRVQFGPVVALNPATLLPLPEEGAPHDCLEILAETHGTRPDLTDQPIPDADHTWYTDGSSFLQEGQRKAGAAVTTETEVIWAGALPAGTSAQRAELIALTQALKMAEGKRLNVYTDSRYAFATAHIHGEIYRRRGLLTSEGREIKNKSEILALLKALFLPKRLSIIHCLGHQKGDSAEARGNRLADQAAREAAIKTPPDTSTLLAGKRTADGSEFEKRTADGSEFESPKKKAKVE

SEQ ID NO: 7022 - protein, 2094 aa, synthetic construct
MPAAKRVKLDGGDKKYSIGLDIGTNSVGWAVITDEYKVPSKKFKVLGNTDRHSIKKNLIGALLFDSGETAEATRLKRTARRRYTRRKNRICYLQEIFSNEMAKVDDSFFHRLEESFLVEEDKKHERHPIFGNIVDEVAYHEKYPTIYHLRKKLVDSTDKADLRLIYLALAHMIKFRGHFLIEGDLNPDNSDVDKLFIQLVQTYNQLFEENPINASGVDAKAILSARLSKSRRLENLIAQLPGEKKNGLFGNLIALSLGLTPNFKSNFDLAEDAKLQLSKDTYDDDLDNLLAQIGDQYADLFLAAKNLSDAILLSDILRVNTEITKAPLSASMIKRYDEHHQDLTLLKALVRQQLPEKYKEIFFDQSKNGYAGYIDGGASQEEFYKFIKPILEKMDGTEELLVKLNREDLLRKQRTFDNGSIPHQIHLGELHAILRRQEDFYPFLKDNREKIEKILTFRIPYYVGPLARGNSRFAWMTRKSEETITPWNFEEVVDKGASAQSFIERMTNFDKNLPNEKVLPKHSLLYEYFTVYNELTKVKYVTEGMRKPAFLSGEQKKAIVDLLFKTNRKVTVKQLKEDYFKKIECFDSVEISGVEDRFNASLGTYHDLLKIIKDKDFLDNEENEDILEDIVLTLTLFEDREMIEERLKTYAHLFDDKVMKQLKRRRYTGWGRLSRKLINGIRDKQSGKTILDFLKSDGFANRNFMQLIHDDSLTFKEDIQKAQVSGQGDSLHEHIANLAGSPAIKKGILQTVKVVDELVKVMGRHKPENIVIEMARENQTTQKGQKNSRERMKRIEEGIKELGSQILKEHPVENTQLQNEKLYLYYLQNGRDMYVDQELDINRLSDYDVDHIVPQSFLKDDSIDNKVLTRSDKARGKSDNVPSEEVVKKMKNYWRQLLNAKLITQRKFDNLTKAERGGLSELDKAGFIKRQLVETRQITKHVAQILDSRMNTKYDENDKLIREVKVITLKSKLVSDFRKDFQFYKVREINNYHHAHDAYLNAVVGTALIKKYPKLESEFVYGDYKVYDVRKMIAKSEQEIGKATAKYFFYSNIMNFFKTEITLANGEIRKRPLIETNGETGEIVWDKGRDFATVRKVLSMPQVNIVKKTEVQTGGFSKESILPKRNSDKLIARKKDWDPKKYGGFDSPTVAYSVLVVAKVEKGKSKKLKSVKELLGITIMERSSFEKNPIDFLEAKGYKEVKKDLIIKLPKYSLFELENGRKRMLASAGELQKGNELALPSKYVNFLYLASHYEKLKGSPEDNEQKQLFVEQHKHYLDEIIEQISEFSKRVILADANLDKVLSAYNKHRDKPIREQAENIIHLFTLTNLGAPAAFKYFDTTIDRKRYTSTKEVLDATLIHQSITGLYETRIDLSQLGGDGGPAPGGSGGGGGTLNIEDEHRLHETSKEPDVSLGSTWLSDFPQAWAETGGMGLAVRQAPLIIPLKATSTPVSIKQYPMSQEARLGIKPHIQRLLDQGILVPCQSPWNTPLLPVKKPGTNDYRPVQDLREVNKRVEDIHPTVPNPYNLLSGLPPSHQWYTVLDLKDAFFCLRLHPTSQPLFAFEWRDPEMGISGQLTWTRLPQGFKNSPTLFDEALHRDLADFRIQHPDLILLQYVDDLLLAATSELDCQQGTRALLQTLGNLGYRASAKKAQICQKQVKYLGYLLKEGQRWLTEARKETVMGQPTPKTPRQLREFLGTAGFCRLWIPGFAEMAAPLYPLTKTGTLFNWGPDQQKAYQEIKQALLTAPALGLPDLTKPFELFVDEKQGYAKGVLTQKLGPWRRPVAYLSKKLDPVAAGWPPCLRMVAAIAVLTKDAGKLTMGQPLVILAPHAVEALVKQPPDRWLSNARMTHYQALLLDTDRVQFGPVVALNPATLLPLPEEGLQHNCLDILAEAHGTRPDLTDQPLPDADHTWYTDGSSLLQEGQRKAGAAVTTETEVIWAKALPAGTSAQRAELIALTQALKMAEGKKLNVYTDSRYAFATAHIHGEIYRRRGLLTSEGKEIKNKDEILALLKALFLPKRLSIIHCPGHQKGHSAEARGNRMADQAARKAAITETPDTSTLLAGKRTADGSEFEKRTADGSEFESPKKKAKVE

SEQ ID NO: 7023 - protein, 2088 aa, synthetic construct
MPAAKRVKLDGGDKKYSIGLDIGTNSVGWAVITDEYKVPSKKFKVLGNTDRHSIKKNLIGALLFDSGETAEATRLKRTARRRYTRRKNRICYLQEIFSNEMAKVDDSFFHRLEESFLVEEDKKHERHPIFGNIVDEVAYHEKYPTIYHLRKKLVDSTDKADLRLIYLALAHMIKFRGHFLIEGDLNPDNSDVDKLFIQLVQTYNQLFEENPINASGVDAKAILSARLSKSRRLENLIAQLPGEKKNGLFGNLIALSLGLTPNFKSNFDLAEDAKLQLSKDTYDDDLDNLLAQIGDQYADLFLAAKNLSDAILLSDILRVNTEITKAPLSASMIKRYDEHHQDLTLLKALVRQQLPEKYKEIFFDQSKNGYAGYIDGGASQEEFYKFIKPILEKMDGTEELLVKLNREDLLRKQRTFDNGSIPHQIHLGELHAILRRQEDFYPFLKDNREKIEKILTFRIPYYVGPLARGNSRFAWMTRKSEETITPWNFEEVVDKGASAQSFIERMTNFDKNLPNEKVLPKHSLLYEYFTVYNELTKVKYVTEGMRKPAFLSGEQKKAIVDLLFKTNRKVTVKQLKEDYFKKIECFDSVEISGVEDRFNASLGTYHDLLKIIKDKDFLDNEENEDILEDIVLTLTLFEDREMIEERLKTYAHLFDDKVMKQLKRRRYTGWGRLSRKLINGIRDKQSGKTILDFLKSDGFANRNFMQLIHDDSLTFKEDIQKAQVSGQGDSLHEHIANLAGSPAIKKGILQTVKVVDELVKVMGRHKPENIVIEMARENQTTQKGQKNSRERMKRIEEGIKELGSQILKEHPVENTQLQNEKLYLYYLQNGRDMYVDQELDINRLSDYDVDHIVPQSFLKDDSIDNKVLTRSDKARGKSDNVPSEEVVKKMKNYWRQLLNAKLITQRKFDNLTKAERGGLSELDKAGFIKRQLVETRQITKHVAQILDSRMNTKYDENDKLIREVKVITLKSKLVSDFRKDFQFYKVREINNYHHAHDAYLNAVVGTALIKKYPKLESEFVYGDYKVYDVRKMIAKSEQEIGKATAKYFFYSNIMNFFKTEITLANGEIRKRPLIETNGETGEIVWDKGRDFATVRKVLSMPQVNIVKKTEVQTGGFSKESILPKRNSDKLIARKKDWDPKKYGGFDSPTVAYSVLVVAKVEKGKSKKLKSVKELLGITIMERSSFEKNPIDFLEAKGYKEVKKDLIIKLPKYSLFELENGRKRMLASAGELQKGNELALPSKYVNFLYLASHYEKLKGSPEDNEQKQLFVEQHKHYLDEIIEQISEFSKRVILADANLDKVLSAYNKHRDKPIREQAENIIHLFTLTNLGAPAAFKYFDTTIDRKRYTSTKEVLDATLIHQSITGLYETRIDLSQLGGDGGPAPGGSGGGGGTLQLDDEYRLYSPLVKPDQNIQFWLEQFPQAWAETAGMGLAKQVPPQVIQLKASATPVSVRQYPLSKEAQEGIRPHVQRLIQQGILVPVQSPWNTPLLPVRKPGTNDYRPVQDLREVNKRVQDIHPTVPNPYNLLCALPPQRSWYTVLDLKDAFFCLRLHPTSQPLFAFEWRDPGTGRTGQLTWTRLPQGFKNSPTIFDEALHRDLANFRIQHPQVTLLQYVDDLLLAGATKQDCLEGTKALLLELSDLGYRASAKKAQICRREVTYLGYSLRDGQRWLTEARKKTVVQIPAPTTAKQVREFLGTAGFCRLWIPGFATLAAPLYPLTKEKGEFSWAPEHQKAFDAIKKALLSAPALALPDVTKPFTLYVDERKGVARGVLTQTLGPWRRPVAYLSKKLDPVASGWPVCLKAIAAVAILVKDADKLTLGQNITVIAPHALENIVRQPPDRWMTNARMTHYQSLLLTERVTFAPPAALNPATLLPEETDEPVTHDCHQLLIEETGVRKDLTDIPLTGEVLTWFTDGSSYVVEGKRMAGAAVVDGTRTIWASSLPEGTSAQKAELMALTQALRLAEGKSINIYTDSRYAFATAHVHGAIYKQRGLLTSAGREIKNKEEILSLLEALHLPKRLAIIHCPGHQKAKDPISRGNQMADRVAKQAAQGVNLLAGKRTADGSEFEKRTADGSEFESPKKKAKVE

SEQ ID NO: 7024 - protein, 2085 aa, synthetic construct
MPAAKRVKLDGGDKKYSIGLDIGTNSVGWAVITDEYKVPSKKFKVLGNTDRHSIKKNLIGALLFDSGETAEATRLKRTARRRYTRRKNRICYLQEIFSNEMAKVDDSFFHRLEESFLVEEDKKHERHPIFGNIVDEVAYHEKYPTIYHLRKKLVDSTDKADLRLIYLALAHMIKFRGHFLIEGDLNPDNSDVDKLFIQLVQTYNQLFEENPINASGVDAKAILSARLSKSRRLENLIAQLPGEKKNGLFGNLIALSLGLTPNFKSNFDLAEDAKLQLSKDTYDDDLDNLLAQIGDQYADLFLAAKNLSDAILLSDILRVNTEITKAPLSASMIKRYDEHHQDLTLLKALVRQQLPEKYKEIFFDQSKNGYAGYIDGGASQEEFYKFIKPILEKMDGTEELLVKLNREDLLRKQRTFDNGSIPHQIHLGELHAILRRQEDFYPFLKDNREKIEKILTFRIPYYVGPLARGNSRFAWMTRKSEETITPWNFEEVVDKGASAQSFIERMTNFDKNLPNEKVLPKHSLLYEYFTVYNELTKVKYVTEGMRKPAFLSGEQKKAIVDLLFKTNRKVTVKQLKEDYFKKIECFDSVEISGVEDRFNASLGTYHDLLKIIKDKDFLDNEENEDILEDIVLTLTLFEDREMIEERLKTYAHLFDDKVMKQLKRRRYTGWGRLSRKLINGIRDKQSGKTILDFLKSDGFANRNFMQLIHDDSLTFKEDIQKAQVSGQGDSLHEHIANLAGSPAIKKGILQTVKVVDELVKVMGRHKPENIVIEMARENQTTQKGQKNSRERMKRIEEGIKELGSQILKEHPVENTQLQNEKLYLYYLQNGRDMYVDQELDINRLSDYDVDHIVPQSFLKDDSIDNKVLTRSDKARGKSDNVPSEEVVKKMKNYWRQLLNAKLITQRKFDNLTKAERGGLSELDKAGFIKRQLVETRQITKHVAQILDSRMNTKYDENDKLIREVKVITLKSKLVSDFRKDFQFYKVREINNYHHAHDAYLNAVVGTALIKKYPKLESEFVYGDYKVYDVRKMIAKSEQEIGKATAKYFFYSNIMNFFKTEITLANGEIRKRPLIETNGETGEIVWDKGRDFATVRKVLSMPQVNIVKKTEVQTGGFSKESILPKRNSDKLIARKKDWDPKKYGGFDSPTVAYSVLVVAKVEKGKSKKLKSVKELLGITIMERSSFEKNPIDFLEAKGYKEVKKDLIIKLPKYSLFELENGRKRMLASAGELQKGNELALPSKYVNFLYLASHYEKLKGSPEDNEQKQLFVEQHKHYLDEIIEQISEFSKRVILADANLDKVLSAYNKHRDKPIREQAENIIHLFTLTNLGAPAAFKYFDTTIDRKRYTSTKEVLDATLIHQSITGLYETRIDLSQLGGDGGPAPGGSGGGGGIPWLMKKPLQLTTLVPLQEYEERLLKQTMLTGSYKEKLQSLFLKYDALWQHWENQVGHRRIKPHHIATGTVNPRPQKQYPINPKAKASIQTVINDLLKQGVLIQQNSIMNTPVYPVPKPDGKWRMVLDYREVNKTIPLIAAQNQHSAGILSSIFRGKYKTTLDLSNGFWAHSITPESYWLTAFTWLGQQYCWTRLPQGFLNSPALFNADVVDLLKEVPNVQVYVDDIYISHDDPREHLEQLEKVFSLLLNAGYVVSLKKSEIAQHEVEFLGFNITKEGRGLTETFKQKLLNITPPRDLKQLQSILGKLNFARNFIPNFSELVKPLYNIIATAPGKYITWTTDNSQQLQNIISMLNSAENLEERNPEVRLIMKVNTSPSAGYIRFYNEFAKRPIMYLNYVYTKAEVKFTNTEKLLTTIHKGLIKALDLGMGQEILVYSPIVSMTKIQKTPLPERKALPIRWITWMSYLEDPRIQFHYDKTLPELQQVPTVTDDIIAKIKHPSEFSMVFYTDGSAIKHPNVNKSHNAGMGIAQVQFKPEFTVINTWSIPLGDHTAQLAEVAAVEFACKKALKIDGPVLIVTDSFYVAESVNKELPYWQSNGFFNNKKKPLKHVSKWKSIADCIQLKPDIIIIHEKGHQPTASTFHTEGNNLADKLATQGSYVVNAGKRTADGSEFEKRTADGSEFESPKKKAKVE

SEQ ID NO: 7025 - protein, 2096 aa, synthetic construct
MPAAKRVKLDGGDKKYSIGLDIGTNSVGWAVITDEYKVPSKKFKVLGNTDRHSIKKNLIGALLFDSGETAEATRLKRTARRRYTRRKNRICYLQEIFSNEMAKVDDSFFHRLEESFLVEEDKKHERHPIFGNIVDEVAYHEKYPTIYHLRKKLVDSTDKADLRLIYLALAHMIKFRGHFLIEGDLNPDNSDVDKLFIQLVQTYNQLFEENPINASGVDAKAILSARLSKSRRLENLIAQLPGEKKNGLFGNLIALSLGLTPNFKSNFDLAEDAKLQLSKDTYDDDLDNLLAQIGDQYADLFLAAKNLSDAILLSDILRVNTEITKAPLSASMIKRYDEHHQDLTLLKALVRQQLPEKYKEIFFDQSKNGYAGYIDGGASQEEFYKFIKPILEKMDGTEELLVKLNREDLLRKQRTFDNGSIPHQIHLGELHAILRRQEDFYPFLKDNREKIEKILTFRIPYYVGPLARGNSRFAWMTRKSEETITPWNFEEVVDKGASAQSFIERMTNFDKNLPNEKVLPKHSLLYEYFTVYNELTKVKYVTEGMRKPAFLSGEQKKAIVDLLFKTNRKVTVKQLKEDYFKKIECFDSVEISGVEDRFNASLGTYHDLLKIIKDKDFLDNEENEDILEDIVLTLTLFEDREMIEERLKTYAHLFDDKVMKQLKRRRYTGWGRLSRKLINGIRDKQSGKTILDFLKSDGFANRNFMQLIHDDSLTFKEDIQKAQVSGQGDSLHEHIANLAGSPAIKKGILQTVKVVDELVKVMGRHKPENIVIEMARENQTTQKGQKNSRERMKRIEEGIKELGSQILKEHPVENTQLQNEKLYLYYLQNGRDMYVDQELDINRLSDYDVDHIVPQSFLKDDSIDNKVLTRSDKARGKSDNVPSEEVVKKMKNYWRQLLNAKLITQRKFDNLTKAERGGLSELDKAGFIKRQLVETRQITKHVAQILDSRMNTKYDENDKLIREVKVITLKSKLVSDFRKDFQFYKVREINNYHHAHDAYLNAVVGTALIKKYPKLESEFVYGDYKVYDVRKMIAKSEQEIGKATAKYFFYSNIMNFFKTEITLANGEIRKRPLIETNGETGEIVWDKGRDFATVRKVLSMPQVNIVKKTEVQTGGFSKESILPKRNSDKLIARKKDWDPKKYGGFDSPTVAYSVLVVAKVEKGKSKKLKSVKELLGITIMERSSFEKNPIDFLEAKGYKEVKKDLIIKLPKYSLFELENGRKRMLASAGELQKGNELALPSKYVNFLYLASHYEKLKGSPEDNEQKQLFVEQHKHYLDEIIEQISEFSKRVILADANLDKVLSAYNKHRDKPIREQAENIIHLFTLTNLGAPAAFKYFDTTIDRKRYTSTKEVLDATLIHQSITGLYETRIDLSQLGGDGGPAPGGGGGSGGTAPLEEEYRLFLEAPIQNVTLLEQWKREIPKVWAEINPPGLASTQAPIHVQLLSTALPVRVRQYPITLEAKRSLRETIRKFRAAGILRPVHSPWNTPLLPVRKSGTSEYRMVQDLREVNKRVETIHPTVPNPYTLLSLLPPDRIWYSVLDLKDAFFCIPLAPESQLIFAFEWADAEEGESGQLTWTRLPQGFKNSPTLFDEALNRDLQGFRLDHPSVSLLQYVDDLLIAADTQAACLSATRDLLMTLAELGYRVSGKKAQLCQEEVTYLGFKIHKGSRSLSNSRTQAILQIPVPKTKRQVREFLGTIGYCRLWIPGFAELAQPLYAATRGGNDPLVWGEKEEEAFQSLKLALTQPPALALPSLDKPFQLFVEETSGAAKGVLTQALGPWKRPVAYLSKRLDPVAAGWPRCLRAIAAAALLTREASKLTFGQDIEITSSHNLESLLRSPPDKWLTNARITQYQVLLLDPPRVRFKQTAALNPATLLPETDDTLPIHHCLDTLDSLTSTRPDLTDQPLAQAEATLFTDGSSYIRDGKRYAGAAVVTLDSVIWAEPLPIGTSAQKAELIALTKALEWSKDKSVNIYTDSRYAFATLHVHGMIYRERGLLTAGGKAIKNAPEILALLTAVWLPKRVAVMHCKGHQKDDAPTSTGNRRADEVAREVAIRPLSTQATISAGKRTADGSEFEKRTADGSEFESPKKKAKVE

SEQ ID NO: 7026 - protein, 2100 aa, synthetic construct
MPAAKRVKLDGGDKKYSIGLDIGTNSVGWAVITDEYKVPSKKFKVLGNTDRHSIKKNLIGALLFDSGETAEATRLKRTARRRYTRRKNRICYLQEIFSNEMAKVDDSFFHRLEESFLVEEDKKHERHPIFGNIVDEVAYHEKYPTIYHLRKKLVDSTDKADLRLIYLALAHMIKFRGHFLIEGDLNPDNSDVDKLFIQLVQTYNQLFEENPINASGVDAKAILSARLSKSRRLENLIAQLPGEKKNGLFGNLIALSLGLTPNFKSNFDLAEDAKLQLSKDTYDDDLDNLLAQIGDQYADLFLAAKNLSDAILLSDILRVNTEITKAPLSASMIKRYDEHHQDLTLLKALVRQQLPEKYKEIFFDQSKNGYAGYIDGGASQEEFYKFIKPILEKMDGTEELLVKLNREDLLRKQRTFDNGSIPHQIHLGELHAILRRQEDFYPFLKDNREKIEKILTFRIPYYVGPLARGNSRFAWMTRKSEETITPWNFEEVVDKGASAQSFIERMTNFDKNLPNEKVLPKHSLLYEYFTVYNELTKVKYVTEGMRKPAFLSGEQKKAIVDLLFKTNRKVTVKQLKEDYFKKIECFDSVEISGVEDRFNASLGTYHDLLKIIKDKDFLDNEENEDILEDIVLTLTLFEDREMIEERLKTYAHLFDDKVMKQLKRRRYTGWGRLSRKLINGIRDKQSGKTILDFLKSDGFANRNFMQLIHDDSLTFKEDIQKAQVSGQGDSLHEHIANLAGSPAIKKGILQTVKVVDELVKVMGRHKPENIVIEMARENQTTQKGQKNSRERMKRIEEGIKELGSQILKEHPVENTQLQNEKLYLYYLQNGRDMYVDQELDINRLSDYDVDHIVPQSFLKDDSIDNKVLTRSDKARGKSDNVPSEEVVKKMKNYWRQLLNAKLITQRKFDNLTKAERGGLSELDKAGFIKRQLVETRQITKHVAQILDSRMNTKYDENDKLIREVKVITLKSKLVSDFRKDFQFYKVREINNYHHAHDAYLNAVVGTALIKKYPKLESEFVYGDYKVYDVRKMIAKSEQEIGKATAKYFFYSNIMNFFKTEITLANGEIRKRPLIETNGETGEIVWDKGRDFATVRKVLSMPQVNIVKKTEVQTGGFSKESILPKRNSDKLIARKKDWDPKKYGGFDSPTVAYSVLVVAKVEKGKSKKLKSVKELLGITIMERSSFEKNPIDFLEAKGYKEVKKDLIIKLPKYSLFELENGRKRMLASAGELQKGNELALPSKYVNFLYLASHYEKLKGSPEDNEQKQLFVEQHKHYLDEIIEQISEFSKRVILADANLDKVLSAYNKHRDKPIREQAENIIHLFTLTNLGAPAAFKYFDTTIDRKRYTSTKEVLDATLIHQSITGLYETRIDLSQLGGDGGPAPGGGGGSGGTVSLQDEHRLFDIPVTTSLPDVWLQDFPQAWAETGGLGRAKCQAPIIIDLKPTAVPVSIKQYPMSLEAHMGIRQHIIKFLELGVLRPCRSPWNTPLLPVKKPGTQDYRPVQDLREINKRTVDIHPTVPNPYNLLSTLKPDYSWYTVLDLKDAFFCLPLAPQSQELFAFEWKDPERGISGQLTWTRLPQGFKNSPTLFNEALHRDLTDFRTQHPEVTLLQYVDDLLLAAPTKKACTQGTRHLLQELGEKGYRASAKKAQICQTKVTYLGYILSEGKRWLTPGRIETVARIPPPRNPREVREFLGTAGFCRLWIPGFAELAAPLYALTKPSTPFTWQTEHQLAFEALKKALLSAPALGLPDTSKPFTLFLDERQGIAKGVLTQKLGPWKRPVAYLSKKLDPVAAGWPPCLRIMAATAMLVKDSAKLTLGQPLTVITPHTLEAIVRQPPDRWITNARLTHYQALLLDTDRVQFGPPVTLNPATLLPVPENQPSPHDCRQVLAETHGTREDLKDQELPDADHTWYTDGSSYLDSGTRRAGAAVVDGHNTIWAQSLPPGTSAQKAELIALTKALELSKGKKANIYTDSRYAFATAHTHGSIYERRGWLTSEGKEIKNKAEIIALLKALFLPQEVAIIHCPGHQKGQDPVAVGNRQADRVARQAAMAEVLTLATEPDNTSHITAGKRTADGSEFEKRTADGSEFESPKKKAKVE

SEQ ID NO: 7027 - protein, 2171 aa, synthetic construct
MPAAKRVKLDGGDKKYSIGLDIGTNSVGWAVITDEYKVPSKKFKVLGNTDRHSIKKNLIGALLFDSGETAEATRLKRTARRRYTRRKNRICYLQEIFSNEMAKVDDSFFHRLEESFLVEEDKKHERHPIFGNIVDEVAYHEKYPTIYHLRKKLVDSTDKADLRLIYLALAHMIKFRGHFLIEGDLNPDNSDVDKLFIQLVQTYNQLFEENPINASGVDAKAILSARLSKSRRLENLIAQLPGEKKNGLFGNLIALSLGLTPNFKSNFDLAEDAKLQLSKDTYDDDLDNLLAQIGDQYADLFLAAKNLSDAILLSDILRVNTEITKAPLSASMIKRYDEHHQDLTLLKALVRQQLPEKYKEIFFDQSKNGYAGYIDGGASQEEFYKFIKPILEKMDGTEELLVKLNREDLLRKQRTFDNGSIPHQIHLGELHAILRRQEDFYPFLKDNREKIEKILTFRIPYYVGPLARGNSRFAWMTRKSEETITPWNFEEVVDKGASAQSFIERMTNFDKNLPNEKVLPKHSLLYEYFTVYNELTKVKYVTEGMRKPAFLSGEQKKAIVDLLFKTNRKVTVKQLKEDYFKKIECFDSVEISGVEDRFNASLGTYHDLLKIIKDKDFLDNEENEDILEDIVLTLTLFEDREMIEERLKTYAHLFDDKVMKQLKRRRYTGWGRLSRKLINGIRDKQSGKTILDFLKSDGFANRNFMQLIHDDSLTFKEDIQKAQVSGQGDSLHEHIANLAGSPAIKKGILQTVKVVDELVKVMGRHKPENIVIEMARENQTTQKGQKNSRERMKRIEEGIKELGSQILKEHPVENTQLQNEKLYLYYLQNGRDMYVDQELDINRLSDYDVDHIVPQSFLKDDSIDNKVLTRSDKARGKSDNVPSEEVVKKMKNYWRQLLNAKLITQRKFDNLTKAERGGLSELDKAGFIKRQLVETRQITKHVAQILDSRMNTKYDENDKLIREVKVITLKSKLVSDFRKDFQFYKVREINNYHHAHDAYLNAVVGTALIKKYPKLESEFVYGDYKVYDVRKMIAKSEQEIGKATAKYFFYSNIMNFFKTEITLANGEIRKRPLIETNGETGEIVWDKGRDFATVRKVLSMPQVNIVKKTEVQTGGFSKESILPKRNSDKLIARKKDWDPKKYGGFDSPTVAYSVLVVAKVEKGKSKKLKSVKELLGITIMERSSFEKNPIDFLEAKGYKEVKKDLIIKLPKYSLFELENGRKRMLASAGELQKGNELALPSKYVNFLYLASHYEKLKGSPEDNEQKQLFVEQHKHYLDEIIEQISEFSKRVILADANLDKVLSAYNKHRDKPIREQAENIIHLFTLTNLGAPAAFKYFDTTIDRKRYTSTKEVLDATLIHQSITGLYETRIDLSQLGGDGGPAPGGGGGSGGMDLLKPLTVERKGVKIKGYWNSQADITCVPKDLLQGEEPVRQQNVTTIHGTQEGDVYYVNLKIDGRRINTEVIGTTLDYAIITPGDVPWILKKPLELTIKLDLEEQQGTLLNNSILSKKGKEELKQLFEKYSALWQSWENQVGHRRIRPHKIATGTVKPTPQKQYHINPKAKPDIQIVINDLLKQGVLIQKESTMNTPVYPVPKPNGRWRMVLDYRAVNKVTPLIAVQNQHSYGILGSLFKGRYKTTIDLSNGFWAHPIVPEDYWITAFTWQGKQYCWTVLPQGFLNSPGLFTGDVVDLLQGIPNVEVYVDDVYISHDSEKEHLEYLDILFNRLKEAGYIISLKKSNIANSIVDFLGFQITNEGRGLTDTFKEKLENITAPTTLKQLQSILGLLNFARNFIPDFTELIAPLYALIPKSTKNYVPWQIEHSTTLETLITKLNGAEYLQGRKGDKTLIMKVNASYTTGYIRYYNEGEKKPISYVSIVFSKTELKFTELEKLLTTVHKGLLKALDLSMGQNIHVYSPIVSMQNIQKTPQTAKKALASRWLSWLSYLEDPRIRFFYDPQMPALKDLPAVDTGKDNKKHPSNFQHIFYTDGSAITSPTKEGHLNAGMGIVYFINKDGNLQKQQEWSISLGNHTAQFAEIAAFEFALKKCLPLGGNILVVTDSNYVAKAYNEELDVWASNGFVNNRKKPLKHISKWKSVADLKRLRPDVVVTHEPGHQKLDSSPHAYGNNLADQLATQASFKVHAGKRTADGSEFEKRTADGSEFESPKKKAKVE

SEQ ID NO: 7028 - protein, 2085 aa, synthetic construct
MPAAKRVKLDGGDKKYSIGLDIGTNSVGWAVITDEYKVPSKKFKVLGNTDRHSIKKNLIGALLFDSGETAEATRLKRTARRRYTRRKNRICYLQEIFSNEMAKVDDSFFHRLEESFLVEEDKKHERHPIFGNIVDEVAYHEKYPTIYHLRKKLVDSTDKADLRLIYLALAHMIKFRGHFLIEGDLNPDNSDVDKLFIQLVQTYNQLFEENPINASGVDAKAILSARLSKSRRLENLIAQLPGEKKNGLFGNLIALSLGLTPNFKSNFDLAEDAKLQLSKDTYDDDLDNLLAQIGDQYADLFLAAKNLSDAILLSDILRVNTEITKAPLSASMIKRYDEHHQDLTLLKALVRQQLPEKYKEIFFDQSKNGYAGYIDGGASQEEFYKFIKPILEKMDGTEELLVKLNREDLLRKQRTFDNGSIPHQIHLGELHAILRRQEDFYPFLKDNREKIEKILTFRIPYYVGPLARGNSRFAWMTRKSEETITPWNFEEVVDKGASAQSFIERMTNFDKNLPNEKVLPKHSLLYEYFTVYNELTKVKYVTEGMRKPAFLSGEQKKAIVDLLFKTNRKVTVKQLKEDYFKKIECFDSVEISGVEDRFNASLGTYHDLLKIIKDKDFLDNEENEDILEDIVLTLTLFEDREMIEERLKTYAHLFDDKVMKQLKRRRYTGWGRLSRKLINGIRDKQSGKTILDFLKSDGFANRNFMQLIHDDSLTFKEDIQKAQVSGQGDSLHEHIANLAGSPAIKKGILQTVKVVDELVKVMGRHKPENIVIEMARENQTTQKGQKNSRERMKRIEEGIKELGSQILKEHPVENTQLQNEKLYLYYLQNGRDMYVDQELDINRLSDYDVDHIVPQSFLKDDSIDNKVLTRSDKARGKSDNVPSEEVVKKMKNYWRQLLNAKLITQRKFDNLTKAERGGLSELDKAGFIKRQLVETRQITKHVAQILDSRMNTKYDENDKLIREVKVITLKSKLVSDFRKDFQFYKVREINNYHHAHDAYLNAVVGTALIKKYPKLESEFVYGDYKVYDVRKMIAKSEQEIGKATAKYFFYSNIMNFFKTEITLANGEIRKRPLIETNGETGEIVWDKGRDFATVRKVLSMPQVNIVKKTEVQTGGFSKESILPKRNSDKLIARKKDWDPKKYGGFDSPTVAYSVLVVAKVEKGKSKKLKSVKELLGITIMERSSFEKNPIDFLEAKGYKEVKKDLIIKLPKYSLFELENGRKRMLASAGELQKGNELALPSKYVNFLYLASHYEKLKGSPEDNEQKQLFVEQHKHYLDEIIEQISEFSKRVILADANLDKVLSAYNKHRDKPIREQAENIIHLFTLTNLGAPAAFKYFDTTIDRKRYTSTKEVLDATLIHQSITGLYETRIDLSQLGGDGGPAPGGGGGSGGVPWILKKPLELTIKLDLEEQQGTLLNNSILSKKGKEELKQLFEKYSALWQSWENQVGHRRIRPHKIATGTVKPTPQKQYHINPKAKPDIQIVINDLLKQGVLIQKESTMNTPVYPVPKPNGRWRMVLDYRAVNKVTPLIAVQNQHSYGILGSLFKGRYKTTIDLSNGFWAHPIVPEDYWITAFTWQGKQYCWTVLPQGFLNSPGLFTGDVVDLLQGIPNVEVYVDDVYISHDSEKEHLEYLDILFNRLKEAGYIISLKKSNIANSIVDFLGFQITNEGRGLTDTFKEKLENITAPTTLKQLQSILGLLNFARNFIPDFTELIAPLYALIPKSTKNYVPWQIEHSTTLETLITKLNGAEYLQGRKGDKTLIMKVNASYTTGYIRYYNEGEKKPISYVSIVFSKTELKFTELEKLLTTVHKGLLKALDLSMGQNIHVYSPIVSMQNIQKTPQTAKKALASRWLSWLSYLEDPRIRFFYDPQMPALKDLPAVDTGKDNKKHPSNFQHIFYTDGSAITSPTKEGHLNAGMGIVYFINKDGNLQKQQEWSISLGNHTAQFAEIAAFEFALKKCLPLGGNILVVTDSNYVAKAYNEELDVWASNGFVNNRKKPLKHISKWKSVADLKRLRPDVVVTHEPGHQKLDSSPHAYGNNLADQLATQASFKVHAGKRTADGSEFEKRTADGSEFESPKKKAKVE

SEQ ID NO: 7029 - protein, 2093 aa, synthetic construct
MPAAKRVKLDGGDKKYSIGLDIGTNSVGWAVITDEYKVPSKKFKVLGNTDRHSIKKNLIGALLFDSGETAEATRLKRTARRRYTRRKNRICYLQEIFSNEMAKVDDSFFHRLEESFLVEEDKKHERHPIFGNIVDEVAYHEKYPTIYHLRKKLVDSTDKADLRLIYLALAHMIKFRGHFLIEGDLNPDNSDVDKLFIQLVQTYNQLFEENPINASGVDAKAILSARLSKSRRLENLIAQLPGEKKNGLFGNLIALSLGLTPNFKSNFDLAEDAKLQLSKDTYDDDLDNLLAQIGDQYADLFLAAKNLSDAILLSDILRVNTEITKAPLSASMIKRYDEHHQDLTLLKALVRQQLPEKYKEIFFDQSKNGYAGYIDGGASQEEFYKFIKPILEKMDGTEELLVKLNREDLLRKQRTFDNGSIPHQIHLGELHAILRRQEDFYPFLKDNREKIEKILTFRIPYYVGPLARGNSRFAWMTRKSEETITPWNFEEVVDKGASAQSFIERMTNFDKNLPNEKVLPKHSLLYEYFTVYNELTKVKYVTEGMRKPAFLSGEQKKAIVDLLFKTNRKVTVKQLKEDYFKKIECFDSVEISGVEDRFNASLGTYHDLLKIIKDKDFLDNEENEDILEDIVLTLTLFEDREMIEERLKTYAHLFDDKVMKQLKRRRYTGWGRLSRKLINGIRDKQSGKTILDFLKSDGFANRNFMQLIHDDSLTFKEDIQKAQVSGQGDSLHEHIANLAGSPAIKKGILQTVKVVDELVKVMGRHKPENIVIEMARENQTTQKGQKNSRERMKRIEEGIKELGSQILKEHPVENTQLQNEKLYLYYLQNGRDMYVDQELDINRLSDYDVDHIVPQSFLKDDSIDNKVLTRSDKARGKSDNVPSEEVVKKMKNYWRQLLNAKLITQRKFDNLTKAERGGLSELDKAGFIKRQLVETRQITKHVAQILDSRMNTKYDENDKLIREVKVITLKSKLVSDFRKDFQFYKVREINNYHHAHDAYLNAVVGTALIKKYPKLESEFVYGDYKVYDVRKMIAKSEQEIGKATAKYFFYSNIMNFFKTEITLANGEIRKRPLIETNGETGEIVWDKGRDFATVRKVLSMPQVNIVKKTEVQTGGFSKESILPKRNSDKLIARKKDWDPKKYGGFDSPTVAYSVLVVAKVEKGKSKKLKSVKELLGITIMERSSFEKNPIDFLEAKGYKEVKKDLIIKLPKYSLFELENGRKRMLASAGELQKGNELALPSKYVNFLYLASHYEKLKGSPEDNEQKQLFVEQHKHYLDEIIEQISEFSKRVILADANLDKVLSAYNKHRDKPIREQAENIIHLFTLTNLGAPAAFKYFDTTIDRKRYTSTKEVLDATLIHQSITGLYETRIDLSQLGGDGGPAPGGGGGSGGTLQLEEEYRLFEPESTQKQEMDIWLKNFPQAWAETGGMGTAHCQAPVLIQLKATATPISIRQYPMPHEAYQGIKPHIRRMLDQGILKPCQSPWNTPLLPVKKPGTEDYRPVQDLREVNKRVEDIHPTVPNPYNLLSTLPPSHPWYTVLDLKDAFFCLRLHSESQLLFAFEWRDPEIGLSGQLTWTRLPQGFKNSPTLFNEALHSDLADFRVRYPALVLLQYVDDLLLAAATRTECLEGTKALLETLGNKGYRASAKKAQICLQEVTYLGYSLKDGQRWLTKARKEAILSIPVPKNSRQVREFLGTAGYCRLWIPGFAELAAPLYPLTRPGTLFQWGTEQQLAFEDIKKALLSSPALGLPDITKPFELFIDENSGFAKGVLVQKLGPWKRPVAYLSKKLDTVASGWPPCLRMVAAIAILVKDAGKLTLGQPLTILTSHPVEALVRQPPNKWLSNARMTHYQAMLLDAERVHFGPTVSLNPATLLPLPSGGNHHDCLQILAETHGTRPDLTDQPLPDADLTWYTDGSSFIRNGEREAGAAVTTESEVIWAAPLPPGTSAQRAELIALTQALKMAEGKKLTVYTDSRYAFATTHVHGEIYRRRGWLTSEGKEIKNKNEILALLEALFLPKRLSIIHCPGHQKGDSPQAKGNRLADDTAKKAATETHSSLTVLPAGKRTADGSEFEKRTADGSEFESPKKKAKVE

SEQ ID NO: 7030 - protein, 2125 aa, synthetic construct
MPAAKRVKLDGGDKKYSIGLDIGTNSVGWAVITDEYKVPSKKFKVLGNTDRHSIKKNLIGALLFDSGETAEATRLKRTARRRYTRRKNRICYLQEIFSNEMAKVDDSFFHRLEESFLVEEDKKHERHPIFGNIVDEVAYHEKYPTIYHLRKKLVDSTDKADLRLIYLALAHMIKFRGHFLIEGDLNPDNSDVDKLFIQLVQTYNQLFEENPINASGVDAKAILSARLSKSRRLENLIAQLPGEKKNGLFGNLIALSLGLTPNFKSNFDLAEDAKLQLSKDTYDDDLDNLLAQIGDQYADLFLAAKNLSDAILLSDILRVNTEITKAPLSASMIKRYDEHHQDLTLLKALVRQQLPEKYKEIFFDQSKNGYAGYIDGGASQEEFYKFIKPILEKMDGTEELLVKLNREDLLRKQRTFDNGSIPHQIHLGELHAILRRQEDFYPFLKDNREKIEKILTFRIPYYVGPLARGNSRFAWMTRKSEETITPWNFEEVVDKGASAQSFIERMTNFDKNLPNEKVLPKHSLLYEYFTVYNELTKVKYVTEGMRKPAFLSGEQKKAIVDLLFKTNRKVTVKQLKEDYFKKIECFDSVEISGVEDRFNASLGTYHDLLKIIKDKDFLDNEENEDILEDIVLTLTLFEDREMIEERLKTYAHLFDDKVMKQLKRRRYTGWGRLSRKLINGIRDKQSGKTILDFLKSDGFANRNFMQLIHDDSLTFKEDIQKAQVSGQGDSLHEHIANLAGSPAIKKGILQTVKVVDELVKVMGRHKPENIVIEMARENQTTQKGQKNSRERMKRIEEGIKELGSQILKEHPVENTQLQNEKLYLYYLQNGRDMYVDQELDINRLSDYDVDHIVPQSFLKDDSIDNKVLTRSDKARGKSDNVPSEEVVKKMKNYWRQLLNAKLITQRKFDNLTKAERGGLSELDKAGFIKRQLVETRQITKHVAQILDSRMNTKYDENDKLIREVKVITLKSKLVSDFRKDFQFYKVREINNYHHAHDAYLNAVVGTALIKKYPKLESEFVYGDYKVYDVRKMIAKSEQEIGKATAKYFFYSNIMNFFKTEITLANGEIRKRPLIETNGETGEIVWDKGRDFATVRKVLSMPQVNIVKKTEVQTGGFSKESILPKRNSDKLIARKKDWDPKKYGGFDSPTVAYSVLVVAKVEKGKSKKLKSVKELLGITIMERSSFEKNPIDFLEAKGYKEVKKDLIIKLPKYSLFELENGRKRMLASAGELQKGNELALPSKYVNFLYLASHYEKLKGSPEDNEQKQLFVEQHKHYLDEIIEQISEFSKRVILADANLDKVLSAYNKHRDKPIREQAENIIHLFTLTNLGAPAAFKYFDTTIDRKRYTSTKEVLDATLIHQSITGLYETRIDLSQLGGDGGPAPGGGGGSGGLLGRDLLTKLKAQIQFSTEGPQVTWEDRPAMCLVLNLEEEYRLHEKPVPPSIDPSWLQLFPMVWAEKAGMGLANQVPPVVVELKSDASPVAVRQYPMSKEAREGIRPHIQRFLDLGILVPCQSPWNTPLLPVKKPGTNDYRPVQDLREVNKRVQDIHPTVPNPYNLLSSLPPSHTWYSVLDLKDAFFCLKLHPNSQPLFAFEWRDPEKGNTGQLTWTRLPQGFKNSPTLFNEALHRDLASFRALNPQVVMLQYVDDLLVAAPTYRDCKEGTRRLLQELSKLGYRVSAKKAQLCREEVTYLGYLLKGGKRWLTPARKATVMKIPTPTTPRQVREFLGTAGFCRLWIPGFASLAAPLYPLTRPKVPFTWTEAHQEAFGRIKEALLSAPALALPDLTKPFALYVDEKEGVARGVLTQTLGPWRRPVAYLSKKLDPVASGWPTCLKAIAAVALLLKDADKLTLGQNVLVIAPHNLESIVRQPPDRWMTNARMTHYQSLLLNERVSFAPPAILNPATLLPVESDDTPIHICSEILAEETGTRPDLRDQPLPGVPAWYTDGSSFIMDGRRQAGAAIVDNKRTVWASNLPEGTSAQKAELIALTQALRLAEGKSINIYTDSRYAFATAHVHGAIYKQRGWLTSAGKDIKNKEEILALLEAIHLPKRVAIIHCPGHQRGTDPVATGNRKADEAAKQAAQSTRILTETTKNAGKRTADGSEFEKRTADGSEFESPKKKAKVE

SEQ ID NO: 7031 - protein, 2125 aa, synthetic construct
MPAAKRVKLDGGDKKYSIGLDIGTNSVGWAVITDEYKVPSKKFKVLGNTDRHSIKKNLIGALLFDSGETAEATRLKRTARRRYTRRKNRICYLQEIFSNEMAKVDDSFFHRLEESFLVEEDKKHERHPIFGNIVDEVAYHEKYPTIYHLRKKLVDSTDKADLRLIYLALAHMIKFRGHFLIEGDLNPDNSDVDKLFIQLVQTYNQLFEENPINASGVDAKAILSARLSKSRRLENLIAQLPGEKKNGLFGNLIALSLGLTPNFKSNFDLAEDAKLQLSKDTYDDDLDNLLAQIGDQYADLFLAAKNLSDAILLSDILRVNTEITKAPLSASMIKRYDEHHQDLTLLKALVRQQLPEKYKEIFFDQSKNGYAGYIDGGASQEEFYKFIKPILEKMDGTEELLVKLNREDLLRKQRTFDNGSIPHQIHLGELHAILRRQEDFYPFLKDNREKIEKILTFRIPYYVGPLARGNSRFAWMTRKSEETITPWNFEEVVDKGASAQSFIERMTNFDKNLPNEKVLPKHSLLYEYFTVYNELTKVKYVTEGMRKPAFLSGEQKKAIVDLLFKTNRKVTVKQLKEDYFKKIECFDSVEISGVEDRFNASLGTYHDLLKIIKDKDFLDNEENEDILEDIVLTLTLFEDREMIEERLKTYAHLFDDKVMKQLKRRRYTGWGRLSRKLINGIRDKQSGKTILDFLKSDGFANRNFMQLIHDDSLTFKEDIQKAQVSGQGDSLHEHIANLAGSPAIKKGILQTVKVVDELVKVMGRHKPENIVIEMARENQTTQKGQKNSRERMKRIEEGIKELGSQILKEHPVENTQLQNEKLYLYYLQNGRDMYVDQELDINRLSDYDVDHIVPQSFLKDDSIDNKVLTRSDKARGKSDNVPSEEVVKKMKNYWRQLLNAKLITQRKFDNLTKAERGGLSELDKAGFIKRQLVETRQITKHVAQILDSRMNTKYDENDKLIREVKVITLKSKLVSDFRKDFQFYKVREINNYHHAHDAYLNAVVGTALIKKYPKLESEFVYGDYKVYDVRKMIAKSEQEIGKATAKYFFYSNIMNFFKTEITLANGEIRKRPLIETNGETGEIVWDKGRDFATVRKVLSMPQVNIVKKTEVQTGGFSKESILPKRNSDKLIARKKDWDPKKYGGFDSPTVAYSVLVVAKVEKGKSKKLKSVKELLGITIMERSSFEKNPIDFLEAKGYKEVKKDLIIKLPKYSLFELENGRKRMLASAGELQKGNELALPSKYVNFLYLASHYEKLKGSPEDNEQKQLFVEQHKHYLDEIIEQISEFSKRVILADANLDKVLSAYNKHRDKPIREQAENIIHLFTLTNLGAPAAFKYFDTTIDRKRYTSTKEVLDATLIHQSITGLYETRIDLSQLGGDGGPAPGGGGGSGGLLGRDLLTKLKAQIQFSTEGPQVTWEDRPAMCLVLNLEEEYRLHEKPVPPSIDPSWLQLFPMVWAEKAGMGLANQVPPVVVELKSDASPVAVRQYPMSKEAREGIRPHIQRFLDLGILVPCQSPWNTPLLPVKKPGTNDYRPVQDLREVNKRVQDIHPTVPNPYNLLSSLPPSHTWYSVLDLKDAFFCLKLHPNSQPLFAFEWRDPEKGNTGQLTWTRLPQGFKNSPTLFNEALHRDLASFRALNPQVVMLQYVDDLLVAAPTYRDCKEGTRRLLQELSKLGYRVSAKKAQLCREEVTYLGYLLKGGKRWLTPARKATVMKIPTPTTPRQVREFLGKAGFCRLFIPGFASLAAPLYPLTRPKVPFTWTEAHQEAFGRIKEALLSAPALALPDLTKPFALYVDEKEGVARGVLTQTLGPWRRPVAYLSKKLDPVASGWPTCLKAIAAVALLLKDADKLTLGQNVLVIAPHNLESIVRQPPDRWMTNARMTHYQSLLLNERVSFAPPAILNPATLLPVESDDTPIHICSEILAEETGTRPDLRDQPLPGVPAWYTDGSSFIMDGRRQAGAAIVDNKRTVWASNLPEGTSAQKAELIALTQALRLAEGKSINIYTDSRYAFATAHVHGAIYKQRGWLTSAGKDIKNKEEILALLEAIHLPKRVAIIHCPGHQRGTDPVATGNRKADEAAKQAAQSTRILTETTKNAGKRTADGSEFEKRTADGSEFESPKKKAKVE

SEQ ID NO: 7032 - protein, 2094 aa, synthetic construct
MPAAKRVKLDGGDKKYSIGLDIGTNSVGWAVITDEYKVPSKKFKVLGNTDRHSIKKNLIGALLFDSGETAEATRLKRTARRRYTRRKNRICYLQEIFSNEMAKVDDSFFHRLEESFLVEEDKKHERHPIFGNIVDEVAYHEKYPTIYHLRKKLVDSTDKADLRLIYLALAHMIKFRGHFLIEGDLNPDNSDVDKLFIQLVQTYNQLFEENPINASGVDAKAILSARLSKSRRLENLIAQLPGEKKNGLFGNLIALSLGLTPNFKSNFDLAEDAKLQLSKDTYDDDLDNLLAQIGDQYADLFLAAKNLSDAILLSDILRVNTEITKAPLSASMIKRYDEHHQDLTLLKALVRQQLPEKYKEIFFDQSKNGYAGYIDGGASQEEFYKFIKPILEKMDGTEELLVKLNREDLLRKQRTFDNGSIPHQIHLGELHAILRRQEDFYPFLKDNREKIEKILTFRIPYYVGPLARGNSRFAWMTRKSEETITPWNFEEVVDKGASAQSFIERMTNFDKNLPNEKVLPKHSLLYEYFTVYNELTKVKYVTEGMRKPAFLSGEQKKAIVDLLFKTNRKVTVKQLKEDYFKKIECFDSVEISGVEDRFNASLGTYHDLLKIIKDKDFLDNEENEDILEDIVLTLTLFEDREMIEERLKTYAHLFDDKVMKQLKRRRYTGWGRLSRKLINGIRDKQSGKTILDFLKSDGFANRNFMQLIHDDSLTFKEDIQKAQVSGQGDSLHEHIANLAGSPAIKKGILQTVKVVDELVKVMGRHKPENIVIEMARENQTTQKGQKNSRERMKRIEEGIKELGSQILKEHPVENTQLQNEKLYLYYLQNGRDMYVDQELDINRLSDYDVDHIVPQSFLKDDSIDNKVLTRSDKARGKSDNVPSEEVVKKMKNYWRQLLNAKLITQRKFDNLTKAERGGLSELDKAGFIKRQLVETRQITKHVAQILDSRMNTKYDENDKLIREVKVITLKSKLVSDFRKDFQFYKVREINNYHHAHDAYLNAVVGTALIKKYPKLESEFVYGDYKVYDVRKMIAKSEQEIGKATAKYFFYSNIMNFFKTEITLANGEIRKRPLIETNGETGEIVWDKGRDFATVRKVLSMPQVNIVKKTEVQTGGFSKESILPKRNSDKLIARKKDWDPKKYGGFDSPTVAYSVLVVAKVEKGKSKKLKSVKELLGITIMERSSFEKNPIDFLEAKGYKEVKKDLIIKLPKYSLFELENGRKRMLASAGELQKGNELALPSKYVNFLYLASHYEKLKGSPEDNEQKQLFVEQHKHYLDEIIEQISEFSKRVILADANLDKVLSAYNKHRDKPIREQAENIIHLFTLTNLGAPAAFKYFDTTIDRKRYTSTKEVLDATLIHQSITGLYETRIDLSQLGGDGGPAPGGGGGSGGTLNLEDEYRLYETSAEPEVSPGSTWLSDFPQAWAETGGMGLAVRQAPLIIPLKATSTPVSIKQYPMSQEAKLGIKPHIQRLLDQGILVPCQSPWNTPLLPVKKPGTNDYRPVQDLREVNKRVEDIHPTVPNPYNLLSGLPPSHRWYTVLDLKDAFFCLRLHPTSQPLFAFEWRDPGMGISGQLTWTRLPQGFKNSPTLFNEALHRDLADFRIQHPDLILLQYVDDILLAATSELDCQQGTRALLLTLGNLGYRASAKKAQLCQKQVKYLGYLLKEGQRWLTEARKETVMGQPTPKTPRQLREFLGKAGFCRLFIPGFAEMAAPLYPLTKPGTLFNWGPDQQKAYQEIKQALLTAPALGLPDLTKPFELFVDEKQGYAKGVLTQKLGPWRRPVAYLSKKLDPVAAGWPPCLRMVAAIAVLRKDAGKLTMGQPLVILAPHAVEALVKQPPDRWLSNARMTHYQAMLLDTDRVQFGPVVALNPATLLPLPEEGAPHDCLEILAETHGTRPDLTDQPIPDADHTWYTDGSSFLQEGQRKAGAAVTTETEVIWARALPAGTSAQRAELIALTQALKMAEGKRLNVYTDSRYAFATAHIHGEIYRRRGWLTSEGREIKNKSEILALLKALFLPKRLSIIHCLGHQKGDSAEARGNRLADQAAREAAIKTPPDTSTLLAGKRTADGSEFEKRTADGSEFESPKKKAKVE

SEQ ID NO: 7033 - protein, 2094 aa, synthetic construct
MPAAKRVKLDGGDKKYSIGLDIGTNSVGWAVITDEYKVPSKKFKVLGNTDRHSIKKNLIGALLFDSGETAEATRLKRTARRRYTRRKNRICYLQEIFSNEMAKVDDSFFHRLEESFLVEEDKKHERHPIFGNIVDEVAYHEKYPTIYHLRKKLVDSTDKADLRLIYLALAHMIKFRGHFLIEGDLNPDNSDVDKLFIQLVQTYNQLFEENPINASGVDAKAILSARLSKSRRLENLIAQLPGEKKNGLFGNLIALSLGLTPNFKSNFDLAEDAKLQLSKDTYDDDLDNLLAQIGDQYADLFLAAKNLSDAILLSDILRVNTEITKAPLSASMIKRYDEHHQDLTLLKALVRQQLPEKYKEIFFDQSKNGYAGYIDGGASQEEFYKFIKPILEKMDGTEELLVKLNREDLLRKQRTFDNGSIPHQIHLGELHAILRRQEDFYPFLKDNREKIEKILTFRIPYYVGPLARGNSRFAWMTRKSEETITPWNFEEVVDKGASAQSFIERMTNFDKNLPNEKVLPKHSLLYEYFTVYNELTKVKYVTEGMRKPAFLSGEQKKAIVDLLFKTNRKVTVKQLKEDYFKKIECFDSVEISGVEDRFNASLGTYHDLLKIIKDKDFLDNEENEDILEDIVLTLTLFEDREMIEERLKTYAHLFDDKVMKQLKRRRYTGWGRLSRKLINGIRDKQSGKTILDFLKSDGFANRNFMQLIHDDSLTFKEDIQKAQVSGQGDSLHEHIANLAGSPAIKKGILQTVKVVDELVKVMGRHKPENIVIEMARENQTTQKGQKNSRERMKRIEEGIKELGSQILKEHPVENTQLQNEKLYLYYLQNGRDMYVDQELDINRLSDYDVDHIVPQSFLKDDSIDNKVLTRSDKARGKSDNVPSEEVVKKMKNYWRQLLNAKLITQRKFDNLTKAERGGLSELDKAGFIKRQLVETRQITKHVAQILDSRMNTKYDENDKLIREVKVITLKSKLVSDFRKDFQFYKVREINNYHHAHDAYLNAVVGTALIKKYPKLESEFVYGDYKVYDVRKMIAKSEQEIGKATAKYFFYSNIMNFFKTEITLANGEIRKRPLIETNGETGEIVWDKGRDFATVRKVLSMPQVNIVKKTEVQTGGFSKESILPKRNSDKLIARKKDWDPKKYGGFDSPTVAYSVLVVAKVEKGKSKKLKSVKELLGITIMERSSFEKNPIDFLEAKGYKEVKKDLIIKLPKYSLFELENGRKRMLASAGELQKGNELALPSKYVNFLYLASHYEKLKGSPEDNEQKQLFVEQHKHYLDEIIEQISEFSKRVILADANLDKVLSAYNKHRDKPIREQAENIIHLFTLTNLGAPAAFKYFDTTIDRKRYTSTKEVLDATLIHQSITGLYETRIDLSQLGGDGGPAPGGGGGSGGTLGIEDEYRLHETSTEPDVSLGSTWLSDFPQAWAETGGMGLAVRQAPLIIPLKATSTPVSIQQYPMSHEARLGIKPHIQRLLDQGILVPCQSPWNTPLLPVKKPGTNDYRPVQDLREVNKRVEDIHPTVPNPYNLLSGLPPSHQWYTVLDLKDAFFCLRLHPTSQPLFAFEWRDPGMGISGQLTWTRLPQGFKNSPTLFNEALHRDLADFRIQHPDLILLQYVDDILLAATSELDCQQGTRALLQTLGDLGYRASAKKAQICQKQVKYLGYLLREGQRWLTEARKETVMGQPVPKTPRQLREFLGTAGFCRLWIPGFAEMAAPLYPLTKPGTLFSWGPDQQKAYQEIKQALLTAPALGLPDLTKPFELFVDEKQGYAKGVLTQKLGPWRRPVAYLSKKLDPVAAGWPPCLRMVAAIAVLTKDAGKLTMGQPLVILAPHAVEALVKQPPDRWLSNARMTHYQAMLLDTDRVQFGPVVALNPATLLPLPEEGAPHDCLEILAETHGTRPDLTDQPIPDADHTWYTDGSSFLQEGQRKAGAAVTTETEVIWAGALPAGTSAQRAELIALTQALKMAEGKRLNVYTDSRYAFATAHIHGEIYRRRGWLTSEGREIKNKSEILALLKALFLPKRLSIIHCLGHQKGDSAEARGNRLADQAAREAAIKTPPDTSTLLAGKRTADGSEFEKRTADGSEFESPKKKAKVE

SEQ ID NO: 7034 - protein, 2094 aa, synthetic construct
MPAAKRVKLDGGDKKYSIGLDIGTNSVGWAVITDEYKVPSKKFKVLGNTDRHSIKKNLIGALLFDSGETAEATRLKRTARRRYTRRKNRICYLQEIFSNEMAKVDDSFFHRLEESFLVEEDKKHERHPIFGNIVDEVAYHEKYPTIYHLRKKLVDSTDKADLRLIYLALAHMIKFRGHFLIEGDLNPDNSDVDKLFIQLVQTYNQLFEENPINASGVDAKAILSARLSKSRRLENLIAQLPGEKKNGLFGNLIALSLGLTPNFKSNFDLAEDAKLQLSKDTYDDDLDNLLAQIGDQYADLFLAAKNLSDAILLSDILRVNTEITKAPLSASMIKRYDEHHQDLTLLKALVRQQLPEKYKEIFFDQSKNGYAGYIDGGASQEEFYKFIKPILEKMDGTEELLVKLNREDLLRKQRTFDNGSIPHQIHLGELHAILRRQEDFYPFLKDNREKIEKILTFRIPYYVGPLARGNSRFAWMTRKSEETITPWNFEEVVDKGASAQSFIERMTNFDKNLPNEKVLPKHSLLYEYFTVYNELTKVKYVTEGMRKPAFLSGEQKKAIVDLLFKTNRKVTVKQLKEDYFKKIECFDSVEISGVEDRFNASLGTYHDLLKIIKDKDFLDNEENEDILEDIVLTLTLFEDREMIEERLKTYAHLFDDKVMKQLKRRRYTGWGRLSRKLINGIRDKQSGKTILDFLKSDGFANRNFMQLIHDDSLTFKEDIQKAQVSGQGDSLHEHIANLAGSPAIKKGILQTVKVVDELVKVMGRHKPENIVIEMARENQTTQKGQKNSRERMKRIEEGIKELGSQILKEHPVENTQLQNEKLYLYYLQNGRDMYVDQELDINRLSDYDVDHIVPQSFLKDDSIDNKVLTRSDKARGKSDNVPSEEVVKKMKNYWRQLLNAKLITQRKFDNLTKAERGGLSELDKAGFIKRQLVETRQITKHVAQILDSRMNTKYDENDKLIREVKVITLKSKLVSDFRKDFQFYKVREINNYHHAHDAYLNAVVGTALIKKYPKLESEFVYGDYKVYDVRKMIAKSEQEIGKATAKYFFYSNIMNFFKTEITLANGEIRKRPLIETNGETGEIVWDKGRDFATVRKVLSMPQVNIVKKTEVQTGGFSKESILPKRNSDKLIARKKDWDPKKYGGFDSPTVAYSVLVVAKVEKGKSKKLKSVKELLGITIMERSSFEKNPIDFLEAKGYKEVKKDLIIKLPKYSLFELENGRKRMLASAGELQKGNELALPSKYVNFLYLASHYEKLKGSPEDNEQKQLFVEQHKHYLDEIIEQISEFSKRVILADANLDKVLSAYNKHRDKPIREQAENIIHLFTLTNLGAPAAFKYFDTTIDRKRYTSTKEVLDATLIHQSITGLYETRIDLSQLGGDGGPAPGGGGGSGGTLNIEDEYRLHETSKEPDVSLGSTWLSDFPQAWAETGGMGLAVRQAPLIIPLKATSTPVSIKQYPMSQEARLGIKPHIQRLLDQGILVPCQSPWNTPLLPVKKPGTNDYRPVQDLREVNKRVEDIHPTVPNPYNLLSGLPPSHQWYTVLDLKDAFFCLRLHPTSQPLFAFEWRDPEMGISGQLTWTRLPQGFKNSPTLFNEALHRDLAGFRIQHPDLILLQYVDDLLLAATSELDCQQGTRALLQTLGDLGYRASAKKAQICQKQVKYLGYLLKEGQRWLTEARKETVMGQPIPKTPRQLREFLGTAGFCRLWIPGFAEMAAPLYPLTKPGTLFNWGPDQQKAFQEIKQALLTAPALGLPDLTKPFELFVDEKQGYAKGVLTQKLGPWRRPVAYLSKKLDPVAAGWPPCLRMVAAIAVLTKDAGKLTMGQPLVILAPHAVEALVKQPPDRWLSNARMTHYQALLLDTDRVQFGPVVALNPATLLPLPEEGLQHDCLDILAEAHGTRSDLMDQPLPDADHTWYTDGSSFLQEGQRKAGAAVTTETEVIWARALPAGTSAQRAELIALTQALKMAEGKKLNVYTDSRYAFATAHIHGEIYRRRGWLTSEGKEIKNKDEILALLKALFLPKRLSIIHCPGHQKGNSAEARGNRMADQAAREVATRETPETSTLLAGKRTADGSEFEKRTADGSEFESPKKKAKVE

SEQ ID NO: 7035 - protein, 2094 aa, synthetic construct
MPAAKRVKLDGGDKKYSIGLDIGTNSVGWAVITDEYKVPSKKFKVLGNTDRHSIKKNLIGALLFDSGETAEATRLKRTARRRYTRRKNRICYLQEIFSNEMAKVDDSFFHRLEESFLVEEDKKHERHPIFGNIVDEVAYHEKYPTIYHLRKKLVDSTDKADLRLIYLALAHMIKFRGHFLIEGDLNPDNSDVDKLFIQLVQTYNQLFEENPINASGVDAKAILSARLSKSRRLENLIAQLPGEKKNGLFGNLIALSLGLTPNFKSNFDLAEDAKLQLSKDTYDDDLDNLLAQIGDQYADLFLAAKNLSDAILLSDILRVNTEITKAPLSASMIKRYDEHHQDLTLLKALVRQQLPEKYKEIFFDQSKNGYAGYIDGGASQEEFYKFIKPILEKMDGTEELLVKLNREDLLRKQRTFDNGSIPHQIHLGELHAILRRQEDFYPFLKDNREKIEKILTFRIPYYVGPLARGNSRFAWMTRKSEETITPWNFEEVVDKGASAQSFIERMTNFDKNLPNEKVLPKHSLLYEYFTVYNELTKVKYVTEGMRKPAFLSGEQKKAIVDLLFKTNRKVTVKQLKEDYFKKIECFDSVEISGVEDRFNASLGTYHDLLKIIKDKDFLDNEENEDILEDIVLTLTLFEDREMIEERLKTYAHLFDDKVMKQLKRRRYTGWGRLSRKLINGIRDKQSGKTILDFLKSDGFANRNFMQLIHDDSLTFKEDIQKAQVSGQGDSLHEHIANLAGSPAIKKGILQTVKVVDELVKVMGRHKPENIVIEMARENQTTQKGQKNSRERMKRIEEGIKELGSQILKEHPVENTQLQNEKLYLYYLQNGRDMYVDQELDINRLSDYDVDHIVPQSFLKDDSIDNKVLTRSDKARGKSDNVPSEEVVKKMKNYWRQLLNAKLITQRKFDNLTKAERGGLSELDKAGFIKRQLVETRQITKHVAQILDSRMNTKYDENDKLIREVKVITLKSKLVSDFRKDFQFYKVREINNYHHAHDAYLNAVVGTALIKKYPKLESEFVYGDYKVYDVRKMIAKSEQEIGKATAKYFFYSNIMNFFKTEITLANGEIRKRPLIETNGETGEIVWDKGRDFATVRKVLSMPQVNIVKKTEVQTGGFSKESILPKRNSDKLIARKKDWDPKKYGGFDSPTVAYSVLVVAKVEKGKSKKLKSVKELLGITIMERSSFEKNPIDFLEAKGYKEVKKDLIIKLPKYSLFELENGRKRMLASAGELQKGNELALPSKYVNFLYLASHYEKLKGSPEDNEQKQLFVEQHKHYLDEIIEQISEFSKRVILADANLDKVLSAYNKHRDKPIREQAENIIHLFTLTNLGAPAAFKYFDTTIDRKRYTSTKEVLDATLIHQSITGLYETRIDLSQLGGDGGPAPGGGGGSGGTLNIEDEYRLHETSKGPDVPLGSTWLSDFPQAWAETGGMGLAVRQAPLIIPLKATSTPVSIKQYPMSQEARLGIKPHIQRLLDQGILVPCQSPWNTPLLPVKKPGTNDYRPVQDLREVNKRVEDIHPTVPNPYNLLSGLPPSHQWYTVLDLKDAFFCLRLHPTSQSLFAFEWRDPEMGISGQLTWTRLPQGFKNSPTLFNEALHRDLADFRIQHPDLILLQYVDDLLLAATSELDCQQGTRALLQTLGDLGYRASAKKAQICQKQVKYLGYLLKEGQRWLTEARKETVMGQPTPKTPRQLREFLGKAGFCRLFIPGFAEMAAPLYPLTKPGTLFEWGPDQQKAYQEIKQALLTAPALGLPDLTKPFELFVDEKQGYAKGVLTQKLGPWRRPVAYLSKKLDPVAAGWPPCLRMVAAIAVLTKDAGKLTMGQPLVILAPHAVEALVKQPPDRWLSNARMTHYQALLLDTDRVQFGPIVALNPATLLPLPEEGLQHDCLDILAEAHGTRPDLTDQPLPDADHTWYTDGSSFLQEGQRKAGAAVTTETEVVWAKALPAGTSAQRAELIALTQALKMAEGKKLNVYTDSRYAFATAHIHGEIYRRRGWLTSEGKEIKNKDEILALLKALFLPKRLSIIHCPGHQKGNRAEARGNRMADQAAREVATRETPETSTLLAGKRTADGSEFEKRTADGSEFESPKKKAKVE

SEQ ID NO: 7036 - protein, 2094 aa, synthetic construct; identical to SEQ ID NO: 4521

SEQ ID NO: 7037 - protein, 2094 aa, synthetic construct
MPAAKRVKLDGGDKKYSIGLDIGTNSVGWAVITDEYKVPSKKFKVLGNTDRHSIKKNLIGALLFDSGETAEATRLKRTARRRYTRRKNRICYLQEIFSNEMAKVDDSFFHRLEESFLVEEDKKHERHPIFGNIVDEVAYHEKYPTIYHLRKKLVDSTDKADLRLIYLALAHMIKFRGHFLIEGDLNPDNSDVDKLFIQLVQTYNQLFEENPINASGVDAKAILSARLSKSRRLENLIAQLPGEKKNGLFGNLIALSLGLTPNFKSNFDLAEDAKLQLSKDTYDDDLDNLLAQIGDQYADLFLAAKNLSDAILLSDILRVNTEITKAPLSASMIKRYDEHHQDLTLLKALVRQQLPEKYKEIFFDQSKNGYAGYIDGGASQEEFYKFIKPILEKMDGTEELLVKLNREDLLRKQRTFDNGSIPHQIHLGELHAILRRQEDFYPFLKDNREKIEKILTFRIPYYVGPLARGNSRFAWMTRKSEETITPWNFEEVVDKGASAQSFIERMTNFDKNLPNEKVLPKHSLLYEYFTVYNELTKVKYVTEGMRKPAFLSGEQKKAIVDLLFKTNRKVTVKQLKEDYFKKIECFDSVEISGVEDRFNASLGTYHDLLKIIKDKDFLDNEENEDILEDIVLTLTLFEDREMIEERLKTYAHLFDDKVMKQLKRRRYTGWGRLSRKLINGIRDKQSGKTILDFLKSDGFANRNFMQLIHDDSLTFKEDIQKAQVSGQGDSLHEHIANLAGSPAIKKGILQTVKVVDELVKVMGRHKPENIVIEMARENQTTQKGQKNSRERMKRIEEGIKELGSQILKEHPVENTQLQNEKLYLYYLQNGRDMYVDQELDINRLSDYDVDHIVPQSFLKDDSIDNKVLTRSDKARGKSDNVPSEEVVKKMKNYWRQLLNAKLITQRKFDNLTKAERGGLSELDKAGFIKRQLVETRQITKHVAQILDSRMNTKYDENDKLIREVKVITLKSKLVSDFRKDFQFYKVREINNYHHAHDAYLNAVVGTALIKKYPKLESEFVYGDYKVYDVRKMIAKSEQEIGKATAKYFFYSNIMNFFKTEITLANGEIRKRPLIETNGETGEIVWDKGRDFATVRKVLSMPQVNIVKKTEVQTGGFSKESILPKRNSDKLIARKKDWDPKKYGGFDSPTVAYSVLVVAKVEKGKSKKLKSVKELLGITIMERSSFEKNPIDFLEAKGYKEVKKDLIIKLPKYSLFELENGRKRMLASAGELQKGNELALPSKYVNFLYLASHYEKLKGSPEDNEQKQLFVEQHKHYLDEIIEQISEFSKRVILADANLDKVLSAYNKHRDKPIREQAENIIHLFTLTNLGAPAAFKYFDTTIDRKRYTSTKEVLDATLIHQSITGLYETRIDLSQLGGDGGPAPGGGGGSGGTLNIEDEHRLHETSKEPDVSLGSTWLSDFPQAWAETGGMGLAVRQAPLIIPLKATSTPVSIKQYPMSQEARLGIKPHIQRLLDQGILVPCQSPWNTPLLPVKKPGTNDYRPVQDLREVNKRVEDIHPTVPNPYNLLSGLPPSHQWYTVLDLKDAFFCLRLHPTSQPLFAFEWRDPEMGISGQLTWTRLPQGFKNSPTLFDEALHRDLADFRIQHPDLILLQYVDDLLLAATSELDCQQGTRALLQTLGNLGYRASAKKAQICQKQVKYLGYLLKEGQRWLTEARKETVMGQPTPKTPRQLREFLGTAGFCRLWIPGFAEMAAPLYPLTKTGTLFNWGPDQQKAYQEIKQALLTAPALGLPDLTKPFELFVDEKQGYAKGVLTQKLGPWRRPVAYLSKKLDPVAAGWPPCLRMVAAIAVLTKDAGKLTMGQPLVILAPHAVEALVKQPPDRWLSNARMTHYQALLLDTDRVQFGPVVALNPATLLPLPEEGLQHNCLDILAEAHGTRPDLTDQPLPDADHTWYTDGSSLLQEGQRKAGAAVTTETEVIWAKALPAGTSAQRAELIALTQALKMAEGKKLNVYTDSRYAFATAHIHGEIYRRRGLLTSEGKEIKNKDEILALLKALFLPKRLSIIHCPGHQKGHSAEARGNRMADQAARKAAITETPDTSTLLAGKRTADGSEFEKRTADGSEFESPKKKAKVE

SEQ ID NO: 7038 - protein, 2094 aa, synthetic construct; identical to SEQ ID NO: 4521

SEQ ID NO: 7039 - protein, 2022 aa, synthetic construct
MPAAKRVKLDGGDKKYSIGLDIGTNSVGWAVITDEYKVPSKKFKVLGNTDRHSIKKNLIGALLFDSGETAEATRLKRTARRRYTRRKNRICYLQEIFSNEMAKVDDSFFHRLEESFLVEEDKKHERHPIFGNIVDEVAYHEKYPTIYHLRKKLVDSTDKADLRLIYLALAHMIKFRGHFLIEGDLNPDNSDVDKLFIQLVQTYNQLFEENPINASGVDAKAILSARLSKSRRLENLIAQLPGEKKNGLFGNLIALSLGLTPNFKSNFDLAEDAKLQLSKDTYDDDLDNLLAQIGDQYADLFLAAKNLSDAILLSDILRVNTEITKAPLSASMIKRYDEHHQDLTLLKALVRQQLPEKYKEIFFDQSKNGYAGYIDGGASQEEFYKFIKPILEKMDGTEELLVKLNREDLLRKQRTFDNGSIPHQIHLGELHAILRRQEDFYPFLKDNREKIEKILTFRIPYYVGPLARGNSRFAWMTRKSEETITPWNFEEVVDKGASAQSFIERMTNFDKNLPNEKVLPKHSLLYEYFTVYNELTKVKYVTEGMRKPAFLSGEQKKAIVDLLFKTNRKVTVKQLKEDYFKKIECFDSVEISGVEDRFNASLGTYHDLLKIIKDKDFLDNEENEDILEDIVLTLTLFEDREMIEERLKTYAHLFDDKVMKQLKRRRYTGWGRLSRKLINGIRDKQSGKTILDFLKSDGFANRNFMQLIHDDSLTFKEDIQKAQVSGQGDSLHEHIANLAGSPAIKKGILQTVKVVDELVKVMGRHKPENIVIEMARENQTTQKGQKNSRERMKRIEEGIKELGSQILKEHPVENTQLQNEKLYLYYLQNGRDMYVDQELDINRLSDYDVDHIVPQSFLKDDSIDNKVLTRSDKARGKSDNVPSEEVVKKMKNYWRQLLNAKLITQRKFDNLTKAERGGLSELDKAGFIKRQLVETRQITKHVAQILDSRMNTKYDENDKLIREVKVITLKSKLVSDFRKDFQFYKVREINNYHHAHDAYLNAVVGTALIKKYPKLESEFVYGDYKVYDVRKMIAKSEQEIGKATAKYFFYSNIMNFFKTEITLANGEIRKRPLIETNGETGEIVWDKGRDFATVRKVLSMPQVNIVKKTEVQTGGFSKESILPKRNSDKLIARKKDWDPKKYGGFDSPTVAYSVLVVAKVEKGKSKKLKSVKELLGITIMERSSFEKNPIDFLEAKGYKEVKKDLIIKLPKYSLFELENGRKRMLASAGELQKGNELALPSKYVNFLYLASHYEKLKGSPEDNEQKQLFVEQHKHYLDEIIEQISEFSKRVILADANLDKVLSAYNKHRDKPIREQAENIIHLFTLTNLGAPAAFKYFDTTIDRKRYTSTKEVLDATLIHQSITGLYETRIDLSQLGGDGGPAPGGGGGSGGGRDIMKDIKVRLMTDSPDDSQDLMIGAIESNLFADQISWKSDQPVWLNQWPLKQEKLQALQQLVTEQLQLGHLEESNSPWNTPVFVIKKKSGKWRLLQDLRAVNATMHDMGALQPGLPSPVAPPKGWEIIIIDLQDCFFNIKLHPEDCKRFAFSVPSPNFKRPYQRFQWKVLPQGMKNSPTLCQKFVDKAILTVRDKYQDSYIVHYMDDILLAHPSRSIVDEILTSMIQALNKHGLVVSTEKIQKYDNLKYLGTHIQGDSVSYQKLQIRTDKLRTLNDFQKLLGNINWIRPFLKLTTGELKPLFEILNPDSNPISTRKLTPEACKALQLMNERLSTARVKRLDLSQPWSLCILKTEYTPTACLWQDGVVEWIHLPHISPKVITPYDIFCTQLIIKGRHRSKELFSKDPDYIVVPYTKVQFDLLLQEKEDWPISLLGFLGEVHFHLPKDPLLTFTLQTAIIFPHMTSTTPLEKGIVIFTDGSANGRSVTYIQGREPIIKENTQNTAQQAEIVAVITAFEEVSQPFNLYTDSKYVTGLFPEIETATLSPRTKIYTELKHLQRLIHKRQEKFYIGHIRGHTGLPGPLAQGNAYADSLTRILTAGKRTADGSEFEKRTADGSEFESPKKKAKVE

SEQ ID NO: 7040 - protein, 2086 aa, synthetic construct
MPAAKRVKLDGGDKKYSIGLDIGTNSVGWAVITDEYKVPSKKFKVLGNTDRHSIKKNLIGALLFDSGETAEATRLKRTARRRYTRRKNRICYLQEIFSNEMAKVDDSFFHRLEESFLVEEDKKHERHPIFGNIVDEVAYHEKYPTIYHLRKKLVDSTDKADLRLIYLALAHMIKFRGHFLIEGDLNPDNSDVDKLFIQLVQTYNQLFEENPINASGVDAKAILSARLSKSRRLENLIAQLPGEKKNGLFGNLIALSLGLTPNFKSNFDLAEDAKLQLSKDTYDDDLDNLLAQIGDQYADLFLAAKNLSDAILLSDILRVNTEITKAPLSASMIKRYDEHHQDLTLLKALVRQQLPEKYKEIFFDQSKNGYAGYIDGGASQEEFYKFIKPILEKMDGTEELLVKLNREDLLRKQRTFDNGSIPHQIHLGELHAILRRQEDFYPFLKDNREKIEKILTFRIPYYVGPLARGNSRFAWMTRKSEETITPWNFEEVVDKGASAQSFIERMTNFDKNLPNEKVLPKHSLLYEYFTVYNELTKVKYVTEGMRKPAFLSGEQKKAIVDLLFKTNRKVTVKQLKEDYFKKIECFDSVEISGVEDRFNASLGTYHDLLKIIKDKDFLDNEENEDILEDIVLTLTLFEDREMIEERLKTYAHLFDDKVMKQLKRRRYTGWGRLSRKLINGIRDKQSGKTILDFLKSDGFANRNFMQLIHDDSLTFKEDIQKAQVSGQGDSLHEHIANLAGSPAIKKGILQTVKVVDELVKVMGRHKPENIVIEMARENQTTQKGQKNSRERMKRIEEGIKELGSQILKEHPVENTQLQNEKLYLYYLQNGRDMYVDQELDINRLSDYDVDHIVPQSFLKDDSIDNKVLTRSDKARGKSDNVPSEEVVKKMKNYWRQLLNAKLITQRKFDNLTKAERGGLSELDKAGFIKRQLVETRQITKHVAQILDSRMNTKYDENDKLIREVKVITLKSKLVSDFRKDFQFYKVREINNYHHAHDAYLNAVVGTALIKKYPKLESEFVYGDYKVYDVRKMIAKSEQEIGKATAKYFFYSNIMNFFKTEITLANGEIRKRPLIETNGETGEIVWDKGRDFATVRKVLSMPQVNIVKKTEVQTGGFSKESILPKRNSDKLIARKKDWDPKKYGGFDSPTVAYSVLVVAKVEKGKSKKLKSVKELLGITIMERSSFEKNPIDFLEAKGYKEVKKDLIIKLPKYSLFELENGRKRMLASAGELQKGNELALPSKYVNFLYLASHYEKLKGSPEDNEQKQLFVEQHKHYLDEIIEQISEFSKRVILADANLDKVLSAYNKHRDKPIREQAENIIHLFTLTNLGAPAAFKYFDTTIDRKRYTSTKEVLDATLIHQSITGLYETRIDLSQLGGDGGPAPGGGGGSGGLDDEYRLYSPLVKPDQNIQFWLEQFPQAWAETAGMGLAKQVPPQVIQLKASATPVSVRQYPLSKEAQEGIRPHVQRLIQQGILVPVQSPWNTPLLPVRKPGTNDYRPVQDLREVNKRVQDIHPTVPNPYNLLCALPPQRSWYTVLDLKDAFFCLRLHPTSQPLFAFEWRDPGTGRTGQLTWTRLPQGFKNSPTIFNEALHRDLANFRIQHPQVTLLQYVDDLLLAGATKQDCLEGTKALLLELSDLGYRASAKKAQICRREVTYLGYSLRDGQRWLTEARKKTVVQIPAPTTAKQVREFLGKAGFCRLFIPGFATLAAPLYPLTKPKGEFSWAPEHQKAFDAIKKALLSAPALALPDVTKPFTLYVDERKGVARGVLTQTLGPWRRPVAYLSKKLDPVASGWPVCLKAIAAVAILVKDADKLTLGQNITVIAPHALENIVRQPPDRWMTNARMTHYQSLLLTERVTFAPPAALNPATLLPEETDEPVTHDCHQLLIEETGVRKDLTDIPLTGEVLTWFTDGSSYVVEGKRMAGAAVVDGTRTIWASSLPEGTSAQKAELMALTQALRLAEGKSINIYTDSRYAFATAHVHGAIYKQRGWLTSAGREIKNKEEILSLLEALHLPKRLAIIHCPGHQKAKDPISRGNQMADRVAKQAAQGVNLLPAGKRTADGSEFEKRTADGSEFESPKKKAKVE

SEQ ID NO: 7041 - protein, 2174 aa, synthetic construct
MPAAKRVKLDGGDKKYSIGLDIGTNSVGWAVITDEYKVPSKKFKVLGNTDRHSIKKNLIGALLFDSGETAEATRLKRTARRRYTRRKNRICYLQEIFSNEMAKVDDSFFHRLEESFLVEEDKKHERHPIFGNIVDEVAYHEKYPTIYHLRKKLVDSTDKADLRLIYLALAHMIKFRGHFLIEGDLNPDNSDVDKLFIQLVQTYNQLFEENPINASGVDAKAILSARLSKSRRLENLIAQLPGEKKNGLFGNLIALSLGLTPNFKSNFDLAEDAKLQLSKDTYDDDLDNLLAQIGDQYADLFLAAKNLSDAILLSDILRVNTEITKAPLSASMIKRYDEHHQDLTLLKALVRQQLPEKYKEIFFDQSKNGYAGYIDGGASQEEFYKFIKPILEKMDGTEELLVKLNREDLLRKQRTFDNGSIPHQIHLGELHAILRRQEDFYPFLKDNREKIEKILTFRIPYYVGPLARGNSRFAWMTRKSEETITPWNFEEVVDKGASAQSFIERMTNFDKNLPNEKVLPKHSLLYEYFTVYNELTKVKYVTEGMRKPAFLSGEQKKAIVDLLFKTNRKVTVKQLKEDYFKKIECFDSVEISGVEDRFNASLGTYHDLLKIIKDKDFLDNEENEDILEDIVLTLTLFEDREMIEERLKTYAHLFDDKVMKQLKRRRYTGWGRLSRKLINGIRDKQSGKTILDFLKSDGFANRNFMQLIHDDSLTFKEDIQKAQVSGQGDSLHEHIANLAGSPAIKKGILQTVKVVDELVKVMGRHKPENIVIEMARENQTTQKGQKNSRERMKRIEEGIKELGSQILKEHPVENTQLQNEKLYLYYLQNGRDMYVDQELDINRLSDYDVDHIVPQSFLKDDSIDNKVLTRSDKARGKSDNVPSEEVVKKMKNYWRQLLNAKLITQRKFDNLTKAERGGLSELDKAGFIKRQLVETRQITKHVAQILDSRMNTKYDENDKLIREVKVITLKSKLVSDFRKDFQFYKVREINNYHHAHDAYLNAVVGTALIKKYPKLESEFVYGDYKVYDVRKMIAKSEQEIGKATAKYFFYSNIMNFFKTEITLANGEIRKRPLIETNGETGEIVWDKGRDFATVRKVLSMPQVNIVKKTEVQTGGFSKESILPKRNSDKLIARKKDWDPKKYGGFDSPTVAYSVLVVAKVEKGKSKKLKSVKELLGITIMERSSFEKNPIDFLEAKGYKEVKKDLIIKLPKYSLFELENGRKRMLASAGELQKGNELALPSKYVNFLYLASHYEKLKGSPEDNEQKQLFVEQHKHYLDEIIEQISEFSKRVILADANLDKVLSAYNKHRDKPIREQAENIIHLFTLTNLGAPAAFKYFDTTIDRKRYTSTKEVLDATLIHQSITGLYETRIDLSQLGGDGGPAPGGGGGSGGMDPLQLLQPLEAEIKGTKLKAHWNSGATITCVPEAFLEDERPIQTMLIKTIHGEKQQDVYYLTFKVQGRKVEAEVLASPYDYILLNPSDVPWLMKKPLQLTVLVPLHEYQERLLQQTALPKEQKELLQKLFLKYDALWQHWENQVGHRRIKPHNIATGTLAPRPQKQYPINPKAKPSIQIVIDDLLKQGVLIQQNSTMNTPVYPVPKPDGKWRMVLDYREVNKTIPLIAAQNQHSAGILSSIYRGKYKTTLDLTNGFWAHPITPESYWLTAFTWQGKQYCWTRLPQGFLNSPALFTADVVDLLKEIPNVQAYVDDIYISHDDPQEHLEQLEKIFSILLNAGYVVSLKKSEIAQREVEFLGFNITKEGRGLTDTFKQKLLNITPPKDLKQLQSILGLLNFARNFIPNYSELVKPLYTIVANANGKFISWTEDNSNQLQHIISVLNQADNLEERNPETRLIIKVNSSPSAGYIRYYNEGSKRPIMYVNYIFSKAEAKFTQTEKLLTTMHKGLIKAMDLAMGQEILVYSPIVSMTKIQRTPLPERKALPVRWITWMTYLEDPRIQFHYDKSLPELQQIPNVTEDVIAKTKHPSEFAMVFYTDGSAIKHPDVNKSHSAGMGIAQVQFIPEYKIVHQWSIPLGDHTAQLAEIAAVEFACKKALKISGPVLIVTDSFYVAESANKELPYWKSNGFLNNKKKPLRHVSKWKSIAECLQLKPDIIIMHEKGHQQPMTTLHTEGNNLADKLATQGSYVVHAGKRTADGSEFEKRTADGSEFESPKKKAKVE

SEQ ID NO: 7042 - protein, 2092 aa, synthetic construct
MPAAKRVKLDGGDKKYSIGLDIGTNSVGWAVITDEYKVPSKKFKVLGNTDRHSIKKNLIGALLFDSGETAEATRLKRTARRRYTRRKNRICYLQEIFSNEMAKVDDSFFHRLEESFLVEEDKKHERHPIFGNIVDEVAYHEKYPTIYHLRKKLVDSTDKADLRLIYLALAHMIKFRGHFLIEGDLNPDNSDVDKLFIQLVQTYNQLFEENPINASGVDAKAILSARLSKSRRLENLIAQLPGEKKNGLFGNLIALSLGLTPNFKSNFDLAEDAKLQLSKDTYDDDLDNLLAQIGDQYADLFLAAKNLSDAILLSDILRVNTEITKAPLSASMIKRYDEHHQDLTLLKALVRQQLPEKYKEIFFDQSKNGYAGYIDGGASQEEFYKFIKPILEKMDGTEELLVKLNREDLLRKQRTFDNGSIPHQIHLGELHAILRRQEDFYPFLKDNREKIEKILTFRIPYYVGPLARGNSRFAWMTRKSEETITPWNFEEVVDKGASAQSFIERMTNFDKNLPNEKVLPKHSLLYEYFTVYNELTKVKYVTEGMRKPAFLSGEQKKAIVDLLFKTNRKVTVKQLKEDYFKKIECFDSVEISGVEDRFNASLGTYHDLLKIIKDKDFLDNEENEDILEDIVLTLTLFEDREMIEERLKTYAHLFDDKVMKQLKRRRYTGWGRLSRKLINGIRDKQSGKTILDFLKSDGFANRNFMQLIHDDSLTFKEDIQKAQVSGQGDSLHEHIANLAGSPAIKKGILQTVKVVDELVKVMGRHKPENIVIEMARENQTTQKGQKNSRERMKRIEEGIKELGSQILKEHPVENTQLQNEKLYLYYLQNGRDMYVDQELDINRLSDYDVDHIVPQSFLKDDSIDNKVLTRSDKARGKSDNVPSEEVVKKMKNYWRQLLNAKLITQRKFDNLTKAERGGLSELDKAGFIKRQLVETRQITKHVAQILDSRMNTKYDENDKLIREVKVITLKSKLVSDFRKDFQFYKVREINNYHHAHDAYLNAVVGTALIKKYPKLESEFVYGDYKVYDVRKMIAKSEQEIGKATAKYFFYSNIMNFFKTEITLANGEIRKRPLIETNGETGEIVWDKGRDFATVRKVLSMPQVNIVKKTEVQTGGFSKESILPKRNSDKLIARKKDWDPKKYGGFDSPTVAYSVLVVAKVEKGKSKKLKSVKELLGITIMERSSFEKNPIDFLEAKGYKEVKKDLIIKLPKYSLFELENGRKRMLASAGELQKGNELALPSKYVNFLYLASHYEKLKGSPEDNEQKQLFVEQHKHYLDEIIEQISEFSKRVILADANLDKVLSAYNKHRDKPIREQAENIIHLFTLTNLGAPAAFKYFDTTIDRKRYTSTKEVLDATLIHQSITGLYETRIDLSQLGGDGGPAPGGGGGSGGVLNLEEEYRLHEKPVPSSIDPSWLQLFPTVWAERAGMGLANQVPPVVVELRSGASPVAVRQYPMSKEAREGIRPHIQRFLDLGVLVPCQSPWNTPLLPVKKPGTNDYRPVQDLREINKRVQDIHPTVPNPYNLLSSLPPSHTWYSVLDLKDAFFCLKLHPNSQPLFAFEWRDPEKGNTGQLTWTRLPQGFKNSPTLFDEALHRDLAPFRALNPQVVLLQYVDDLLVAAPTYRDCKEGTQKLLQELSKLGYRVSAKKAQLCQKEVTYLGYLLKEGKRWLTPARKATVMKIPPPTTPRQVREFLGTAGFCRLWIPGFASLAAPLYPLTKESIPFIWTEEHQKAFDRIKEALLSAPALALPDLTKPFTLYVDERAGVARGVLTQTLGPWRRPVAYLSKKLDPVASGWPTCLKAVAAVALLLKDADKLTLGQNVTVIASHSLESIVRQPPDRWMTNARMTHYQSLLLNERVSFAPPAVLNPATLLPVESEATPVHRCSEILAEETGTRRDLKDQPLPGVPAWYTDGSSFIAEGKRRAGAAIVDGKRTVWASSLPEGTSAQKAELVALTQALRLAEGKDINIYTDSRYAFATAHIHGAIYKQRGLLTSAGKDIKNKEEILALLEAIHLPKRVAIIHCPGHQKGNDPVATGNRRADEAAKQAALSTRVLAETTKPAGKRTADGSEFEKRTADGSEFESPKKKAKVE

SEQ ID NO: 7043 - protein, 2092 aa, synthetic construct
MPAAKRVKLDGGDKKYSIGLDIGTNSVGWAVITDEYKVPSKKFKVLGNTDRHSIKKNLIGALLFDSGETAEATRLKRTARRRYTRRKNRICYLQEIFSNEMAKVDDSFFHRLEESFLVEEDKKHERHPIFGNIVDEVAYHEKYPTIYHLRKKLVDSTDKADLRLIYLALAHMIKFRGHFLIEGDLNPDNSDVDKLFIQLVQTYNQLFEENPINASGVDAKAILSARLSKSRRLENLIAQLPGEKKNGLFGNLIALSLGLTPNFKSNFDLAEDAKLQLSKDTYDDDLDNLLAQIGDQYADLFLAAKNLSDAILLSDILRVNTEITKAPLSASMIKRYDEHHQDLTLLKALVRQQLPEKYKEIFFDQSKNGYAGYIDGGASQEEFYKFIKPILEKMDGTEELLVKLNREDLLRKQRTFDNGSIPHQIHLGELHAILRRQEDFYPFLKDNREKIEKILTFRIPYYVGPLARGNSRFAWMTRKSEETITPWNFEEVVDKGASAQSFIERMTNFDKNLPNEKVLPKHSLLYEYFTVYNELTKVKYVTEGMRKPAFLSGEQKKAIVDLLFKTNRKVTVKQLKEDYFKKIECFDSVEISGVEDRFNASLGTYHDLLKIIKDKDFLDNEENEDILEDIVLTLTLFEDREMIEERLKTYAHLFDDKVMKQLKRRRYTGWGRLSRKLINGIRDKQSGKTILDFLKSDGFANRNFMQLIHDDSLTFKEDIQKAQVSGQGDSLHEHIANLAGSPAIKKGILQTVKVVDELVKVMGRHKPENIVIEMARENQTTQKGQKNSRERMKRIEEGIKELGSQILKEHPVENTQLQNEKLYLYYLQNGRDMYVDQELDINRLSDYDVDHIVPQSFLKDDSIDNKVLTRSDKARGKSDNVPSEEVVKKMKNYWRQLLNAKLITQRKFDNLTKAERGGLSELDKAGFIKRQLVETRQITKHVAQILDSRMNTKYDENDKLIREVKVITLKSKLVSDFRKDFQFYKVREINNYHHAHDAYLNAVVGTALIKKYPKLESEFVYGDYKVYDVRKMIAKSEQEIGKATAKYFFYSNIMNFFKTEITLANGEIRKRPLIETNGETGEIVWDKGRDFATVRKVLSMPQVNIVKKTEVQTGGFSKESILPKRNSDKLIARKKDWDPKKYGGFDSPTVAYSVLVVAKVEKGKSKKLKSVKELLGITIMERSSFEKNPIDFLEAKGYKEVKKDLIIKLPKYSLFELENGRKRMLASAGELQKGNELALPSKYVNFLYLASHYEKLKGSPEDNEQKQLFVEQHKHYLDEIIEQISEFSKRVILADANLDKVLSAYNKHRDKPIREQAENIIHLFTLTNLGAPAAFKYFDTTIDRKRYTSTKEVLDATLIHQSITGLYETRIDLSQLGGDGGPAPGGGGGSGGVLNLEEEYRLHEKPVPSSIDPSWLQLFPTVWAERAGMGLANQVPPVVVELRSGASPVAVRQYPMSKEAREGIRPHIQRFLDLGVLVPCQSPWNTPLLPVKKPGTNDYRPVQDLREINKRVQDIHPTVPNPYNLLSSLPPSHTWYSVLDLKDAFFCLKLHPNSQPLFAFEWRDPEKGNTGQLTWTRLPQGFKNSPTLFNEALHRDLAPFRALNPQVVLLQYVDDLLVAAPTYRDCKEGTQKLLQELSKLGYRVSAKKAQLCQKEVTYLGYLLKEGKRWLTPARKATVMKIPPPTTPRQVREFLGKAGFCRLFIPGFASLAAPLYPLTKPSIPFIWTEEHQKAFDRIKEALLSAPALALPDLTKPFTLYVDERAGVARGVLTQTLGPWRRPVAYLSKKLDPVASGWPTCLKAVAAVALLLKDADKLTLGQNVTVIASHSLESIVRQPPDRWMTNARMTHYQSLLLNERVSFAPPAVLNPATLLPVESEATPVHRCSEILAEETGTRRDLKDQPLPGVPAWYTDGSSFIAEGKRRAGAAIVDGKRTVWASSLPEGTSAQKAELVALTQALRLAEGKDINIYTDSRYAFATAHIHGAIYKQRGWLTSAGKDIKNKEEILALLEAIHLPKRVAIIHCPGHQKGNDPVATGNRRADEAAKQAALSTRVLAETTKPAGKRTADGSEFEKRTADGSEFESPKKKAKVE

SEQ ID NO: 7044 - protein, 2094 aa, synthetic construct
MPAAKRVKLDGGDKKYSIGLDIGTNSVGWAVITDEYKVPSKKFKVLGNTDRHSIKKNLIGALLFDSGETAEATRLKRTARRRYTRRKNRICYLQEIFSNEMAKVDDSFFHRLEESFLVEEDKKHERHPIFGNIVDEVAYHEKYPTIYHLRKKLVDSTDKADLRLIYLALAHMIKFRGHFLIEGDLNPDNSDVDKLFIQLVQTYNQLFEENPINASGVDAKAILSARLSKSRRLENLIAQLPGEKKNGLFGNLIALSLGLTPNFKSNFDLAEDAKLQLSKDTYDDDLDNLLAQIGDQYADLFLAAKNLSDAILLSDILRVNTEITKAPLSASMIKRYDEHHQDLTLLKALVRQQLPEKYKEIFFDQSKNGYAGYIDGGASQEEFYKFIKPILEKMDGTEELLVKLNREDLLRKQRTFDNGSIPHQIHLGELHAILRRQEDFYPFLKDNREKIEKILTFRIPYYVGPLARGNSRFAWMTRKSEETITPWNFEEVVDKGASAQSFIERMTNFDKNLPNEKVLPKHSLLYEYFTVYNELTKVKYVTEGMRKPAFLSGEQKKAIVDLLFKTNRKVTVKQLKEDYFKKIECFDSVEISGVEDRFNASLGTYHDLLKIIKDKDFLDNEENEDILEDIVLTLTLFEDREMIEERLKTYAHLFDDKVMKQLKRRRYTGWGRLSRKLINGIRDKQSGKTILDFLKSDGFANRNFMQLIHDDSLTFKEDIQKAQVSGQGDSLHEHIANLAGSPAIKKGILQTVKVVDELVKVMGRHKPENIVIEMARENQTTQKGQKNSRERMKRIEEGIKELGSQILKEHPVENTQLQNEKLYLYYLQNGRDMYVDQELDINRLSDYDVDHIVPQSFLKDDSIDNKVLTRSDKARGKSDNVPSEEVVKKMKNYWRQLLNAKLITQRKFDNLTKAERGGLSELDKAGFIKRQLVETRQITKHVAQILDSRMNTKYDENDKLIREVKVITLKSKLVSDFRKDFQFYKVREINNYHHAHDAYLNAVVGTALIKKYPKLESEFVYGDYKVYDVRKMIAKSEQEIGKATAKYFFYSNIMNFFKTEITLANGEIRKRPLIETNGETGEIVWDKGRDFATVRKVLSMPQVNIVKKTEVQTGGFSKESILPKRNSDKLIARKKDWDPKKYGGFDSPTVAYSVLVVAKVEKGKSKKLKSVKELLGITIMERSSFEKNPIDFLEAKGYKEVKKDLIIKLPKYSLFELENGRKRMLASAGELQKGNELALPSKYVNFLYLASHYEKLKGSPEDNEQKQLFVEQHKHYLDEIIEQISEFSKRVILADANLDKVLSAYNKHRDKPIREQAENIIHLFTLTNLGAPAAFKYFDTTIDRKRYTSTKEVLDATLIHQSITGLYETRIDLSQLGGDGGPAPGGGGGSGGTLNIEDEYRLHETSKEPDVPLGSTWLSDFPQAWAETGGMGLAVRQAPLIIPLKATSTPVSIKQYPMSQEARLGIKPHIQRLLDQGILVPCQSPWNTPLLPVKKPGTNDYRPVQDLREVNKRVEDIHPTVPNPYNLLSGLPPSHQWYTVLDLKDAFFCLRLHPTSQPLFAFEWRDPEMGISGQLTWTRLPQGFKNSPTLFNEALHRDLADFRIQHPDLILLQYVDDLLLAATSEQDCQRGTRALLQTLGNLGYRASAKKAQICQKQVKYLGYLLKEGQRWLTEARKETVMGQPTPKTPRQLREFLGTAGFCRLWIPGFAEMAAPLYPLTKPGTLFNWGPDQQKAYQEIKQALLTAPALGLPDLTKPFELFVDEKQGYAKGVLTQKLGPWRRPVAYLSKKLDPVAAGWPPCLRMVAAIAVLTKDAGKLTMGQPLVILAPHAVEALVKQPPDRWLSNARMTHYQAMLLDTDRVQFGPVVALNPATLLPLPEKEAPHDCLEILAETHGTRPDLTDQPIPDADYTWYTDGSSFLQEGQRRAGAAVTTETEVIWARALPAGTSAQRAELIALTQALKMAEGKKLNVYTDSRYAFATAHVHGEIYRRRGWLTSEGREIKNKNEILALLKALFLPKRLSIIHCPGHQKGNSAEARGNRMADQAAREAAMKAVLETSTLLAGKRTADGSEFEKRTADGSEFESPKKKAKVE

SEQ ID NO: 7045 - protein, 2098 aa, synthetic construct
MPAAKRVKLDGGDKKYSIGLDIGTNSVGWAVITDEYKVPSKKFKVLGNTDRHSIKKNLIGALLFDSGETAEATRLKRTARRRYTRRKNRICYLQEIFSNEMAKVDDSFFHRLEESFLVEEDKKHERHPIFGNIVDEVAYHEKYPTIYHLRKKLVDSTDKADLRLIYLALAHMIKFRGHFLIEGDLNPDNSDVDKLFIQLVQTYNQLFEENPINASGVDAKAILSARLSKSRRLENLIAQLPGEKKNGLFGNLIALSLGLTPNFKSNFDLAEDAKLQLSKDTYDDDLDNLLAQIGDQYADLFLAAKNLSDAILLSDILRVNTEITKAPLSASMIKRYDEHHQDLTLLKALVRQQLPEKYKEIFFDQSKNGYAGYIDGGASQEEFYKFIKPILEKMDGTEELLVKLNREDLLRKQRTFDNGSIPHQIHLGELHAILRRQEDFYPFLKDNREKIEKILTFRIPYYVGPLARGNSRFAWMTRKSEETITPWNFEEVVDKGASAQSFIERMTNFDKNLPNEKVLPKHSLLYEYFTVYNELTKVKYVTEGMRKPAFLSGEQKKAIVDLLFKTNRKVTVKQLKEDYFKKIECFDSVEISGVEDRFNASLGTYHDLLKIIKDKDFLDNEENEDILEDIVLTLTLFEDREMIEERLKTYAHLFDDKVMKQLKRRRYTGWGRLSRKLINGIRDKQSGKTILDFLKSDGFANRNFMQLIHDDSLTFKEDIQKAQVSGQGDSLHEHIANLAGSPAIKKGILQTVKVVDELVKVMGRHKPENIVIEMARENQTTQKGQKNSRERMKRIEEGIKELGSQILKEHPVENTQLQNEKLYLYYLQNGRDMYVDQELDINRLSDYDVDHIVPQSFLKDDSIDNKVLTRSDKARGKSDNVPSEEVVKKMKNYWRQLLNAKLITQRKFDNLTKAERGGLSELDKAGFIKRQLVETRQITKHVAQILDSRMNTKYDENDKLIREVKVITLKSKLVSDFRKDFQFYKVREINNYHHAHDAYLNAVVGTALIKKYPKLESEFVYGDYKVYDVRKMIAKSEQEIGKATAKYFFYSNIMNFFKTEITLANGEIRKRPLIETNGETGEIVWDKGRDFATVRKVLSMPQVNIVKKTEVQTGGFSKESILPKRNSDKLIARKKDWDPKKYGGFDSPTVAYSVLVVAKVEKGKSKKLKSVKELLGITIMERSSFEKNPIDFLEAKGYKEVKKDLIIKLPKYSLFELENGRKRMLASAGELQKGNELALPSKYVNFLYLASHYEKLKGSPEDNEQKQLFVEQHKHYLDEIIEQISEFSKRVILADANLDKVLSAYNKHRDKPIREQAENIIHLFTLTNLGAPAAFKYFDTTIDRKRYTSTKEVLDATLIHQSITGLYETRIDLSQLGGDGGGGSGSSEAAAKGGTAPLEEEYRLFLEAPIQNVTLLEQWKREIPKVWAEINPPGLASTQAPIHVQLLSTALPVRVRQYPITLEAKRSLRETIRKFRAAGILRPVHSPWNTPLLPVRKSGTSEYRMVQDLREVNKRVETIHPTVPNPYTLLSLLPPDRIWYSVLDLKDAFFCIPLAPESQLIFAFEWADAEEGESGQLTWTRLPQGFKNSPTLFNEALNRDLQGFRLDHPSVSLLQYVDDLLIAADTQAACLSATRDLLMTLAELGYRVSGKKAQLCQEEVTYLGFKIHKGSRSLSNSRTQAILQIPVPKTKRQVREFLGTIGYCRLWIPGFAELAQPLYAATRPGNDPLVWGEKEEEAFQSLKLALTQPPALALPSLDKPFQLFVEETSGAAKGVLTQALGPWKRPVAYLSKRLDPVAAGWPRCLRAIAAAALLTREASKLTFGQDIEITSSHNLESLLRSPPDKWLTNARITQYQVLLLDPPRVRFKQTAALNPATLLPETDDTLPIHHCLDTLDSLTSTRPDLTDQPLAQAEATLFTDGSSYIRDGKRYAGAAVVTLDSVIWAEPLPIGTSAQKAELIALTKALEWSKDKSVNIYTDSRYAFATLHVHGMIYRERGWLTAGGKAIKNAPEILALLTAVWLPKRVAVMHCKGHQKDDAPTSTGNRRADEVAREVAIRPLSTQATISAGKRTADGSEFEKRTADGSEFESPKKKAKVE

SEQ ID NO: 7046 - protein, 2098 aa, synthetic construct
MPAAKRVKLDGGDKKYSIGLDIGTNSVGWAVITDEYKVPSKKFKVLGNTDRHSIKKNLIGALLFDSGETAEATRLKRTARRRYTRRKNRICYLQEIFSNEMAKVDDSFFHRLEESFLVEEDKKHERHPIFGNIVDEVAYHEKYPTIYHLRKKLVDSTDKADLRLIYLALAHMIKFRGHFLIEGDLNPDNSDVDKLFIQLVQTYNQLFEENPINASGVDAKAILSARLSKSRRLENLIAQLPGEKKNGLFGNLIALSLGLTPNFKSNFDLAEDAKLQLSKDTYDDDLDNLLAQIGDQYADLFLAAKNLSDAILLSDILRVNTEITKAPLSASMIKRYDEHHQDLTLLKALVRQQLPEKYKEIFFDQSKNGYAGYIDGGASQEEFYKFIKPILEKMDGTEELLVKLNREDLLRKQRTFDNGSIPHQIHLGELHAILRRQEDFYPFLKDNREKIEKILTFRIPYYVGPLARGNSRFAWMTRKSEETITPWNFEEVVDKGASAQSFIERMTNFDKNLPNEKVLPKHSLLYEYFTVYNELTKVKYVTEGMRKPAFLSGEQKKAIVDLLFKTNRKVTVKQLKEDYFKKIECFDSVEISGVEDRFNASLGTYHDLLKIIKDKDFLDNEENEDILEDIVLTLTLFEDREMIEERLKTYAHLFDDKVMKQLKRRRYTGWGRLSRKLINGIRDKQSGKTILDFLKSDGFANRNFMQLIHDDSLTFKEDIQKAQVSGQGDSLHEHIANLAGSPAIKKGILQTVKVVDELVKVMGRHKPENIVIEMARENQTTQKGQKNSRERMKRIEEGIKELGSQILKEHPVENTQLQNEKLYLYYLQNGRDMYVDQELDINRLSDYDVDHIVPQSFLKDDSIDNKVLTRSDKARGKSDNVPSEEVVKKMKNYWRQLLNAKLITQRKFDNLTKAERGGLSELDKAGFIKRQLVETRQITKHVAQILDSRMNTKYDENDKLIREVKVITLKSKLVSDFRKDFQFYKVREINNYHHAHDAYLNAVVGTALIKKYPKLESEFVYGDYKVYDVRKMIAKSEQEIGKATAKYFFYSNIMNFFKTEITLANGEIRKRPLIETNGETGEIVWDKGRDFATVRKVLSMPQVNIVKKTEVQTGGFSKESILPKRNSDKLIARKKDWDPKKYGGFDSPTVAYSVLVVAKVEKGKSKKLKSVKELLGITIMERSSFEKNPIDFLEAKGYKEVKKDLIIKLPKYSLFELENGRKRMLASAGELQKGNELALPSKYVNFLYLASHYEKLKGSPEDNEQKQLFVEQHKHYLDEIIEQISEFSKRVILADANLDKVLSAYNKHRDKPIREQAENIIHLFTLTNLGAPAAFKYFDTTIDRKRYTSTKEVLDATLIHQSITGLYETRIDLSQLGGDGGGGSGSSEAAAKGGTAPLEEEYRLFLEAPIQNVTLLEQWKREIPKVWAEINPPGLASTQAPIHVQLLSTALPVRVRQYPITLEAKRSLRETIRKFRAAGILRPVHSPWNTPLLPVRKSGTSEYRMVQDLREVNKRVETIHPTVPNPYTLLSLLPPDRIWYSVLDLKDAFFCIPLAPESQLIFAFEWADAEEGESGQLTWTRLPQGFKNSPTLFNEALNRDLQGFRLDHPSVSLLQYVDDLLIAADTQAACLSATRDLLMTLAELGYRVSGKKAQLCQEEVTYLGFKIHKGSRSLSNSRTQAILQIPVPKTKRQVREFLGKIGYCRLFIPGFAELAQPLYAATRPGNDPLVWGEKEEEAFQSLKLALTQPPALALPSLDKPFQLFVEETSGAAKGVLTQALGPWKRPVAYLSKRLDPVAAGWPRCLRAIAAAALLTREASKLTFGQDIEITSSHNLESLLRSPPDKWLTNARITQYQVLLLDPPRVRFKQTAALNPATLLPETDDTLPIHHCLDTLDSLTSTRPDLTDQPLAQAEATLFTDGSSYIRDGKRYAGAAVVTLDSVIWAEPLPIGTSAQKAELIALTKALEWSKDKSVNIYTDSRYAFATLHVHGMIYRERGWLTAGGKAIKNAPEILALLTAVWLPKRVAVMHCKGHQKDDAPTSTGNRRADEVAREVAIRPLSTQATISAGKRTADGSEFEKRTADGSEFESPKKKAKVE

SEQ ID NO: 7047 - protein, 2218 aa, synthetic construct
MPAAKRVKLDGGDKKYSIGLDIGTNSVGWAVITDEYKVPSKKFKVLGNTDRHSIKKNLIGALLFDSGETAEATRLKRTARRRYTRRKNRICYLQEIFSNEMAKVDDSFFHRLEESFLVEEDKKHERHPIFGNIVDEVAYHEKYPTIYHLRKKLVDSTDKADLRLIYLALAHMIKFRGHFLIEGDLNPDNSDVDKLFIQLVQTYNQLFEENPINASGVDAKAILSARLSKSRRLENLIAQLPGEKKNGLFGNLIALSLGLTPNFKSNFDLAEDAKLQLSKDTYDDDLDNLLAQIGDQYADLFLAAKNLSDAILLSDILRVNTEITKAPLSASMIKRYDEHHQDLTLLKALVRQQLPEKYKEIFFDQSKNGYAGYIDGGASQEEFYKFIKPILEKMDGTEELLVKLNREDLLRKQRTFDNGSIPHQIHLGELHAILRRQEDFYPFLKDNREKIEKILTFRIPYYVGPLARGNSRFAWMTRKSEETITPWNFEEVVDKGASAQSFIERMTNFDKNLPNEKVLPKHSLLYEYFTVYNELTKVKYVTEGMRKPAFLSGEQKKAIVDLLFKTNRKVTVKQLKEDYFKKIECFDSVEISGVEDRFNASLGTYHDLLKIIKDKDFLDNEENEDILEDIVLTLTLFEDREMIEERLKTYAHLFDDKVMKQLKRRRYTGWGRLSRKLINGIRDKQSGKTILDFLKSDGFANRNFMQLIHDDSLTFKEDIQKAQVSGQGDSLHEHIANLAGSPAIKKGILQTVKVVDELVKVMGRHKPENIVIEMARENQTTQKGQKNSRERMKRIEEGIKELGSQILKEHPVENTQLQNEKLYLYYLQNGRDMYVDQELDINRLSDYDVDHIVPQSFLKDDSIDNKVLTRSDKARGKSDNVPSEEVVKKMKNYWRQLLNAKLITQRKFDNLTKAERGGLSELDKAGFIKRQLVETRQITKHVAQILDSRMNTKYDENDKLIREVKVITLKSKLVSDFRKDFQFYKVREINNYHHAHDAYLNAVVGTALIKKYPKLESEFVYGDYKVYDVRKMIAKSEQEIGKATAKYFFYSNIMNFFKTEITLANGEIRKRPLIETNGETGEIVWDKGRDFATVRKVLSMPQVNIVKKTEVQTGGFSKESILPKRNSDKLIARKKDWDPKKYGGFDSPTVAYSVLVVAKVEKGKSKKLKSVKELLGITIMERSSFEKNPIDFLEAKGYKEVKKDLIIKLPKYSLFELENGRKRMLASAGELQKGNELALPSKYVNFLYLASHYEKLKGSPEDNEQKQLFVEQHKHYLDEIIEQISEFSKRVILADANLDKVLSAYNKHRDKPIREQAENIIHLFTLTNLGAPAAFKYFDTTIDRKRYTSTKEVLDATLIHQSITGLYETRIDLSQLGGDGGGGSGSSEAAAKGGTLGDQGSRGSDPLPEPRVTLTVEGIPTEFLVNTGAEHSVLTKPMGKMGSKRTVVAGATGSKVYPWTTKRLLKIGQKQVTHSFLVIPECPAPLLGRDLLTKLKAQIQFSTEGPQVTWEDRPAMCLVLNLEEEYRLHEKPVPPSIDPSWLQLFPMVWAEKAGMGLANQVPPVVVELKSDASPVAVRQYPMSKEAREGIRPHIQRFLDLGILVPCQSPWNTPLLPVKKPGTNDYRPVQDLREVNKRVQDIHPTVPNPYNLLSSLPPSHTWYSVLDLKDAFFCLKLHPNSQPLFAFEWRDPEKGNTGQLTWTRLPQGFKNSPTLFDEALHRDLASFRALNPQVVMLQYVDDLLVAAPTYRDCKEGTRRLLQELSKLGYRVSAKKAQLCREEVTYLGYLLKGGKRWLTPARKATVMKIPTPTTPRQVREFLGTAGFCRLWIPGFASLAAPLYPLTREKVPFTWTEAHQEAFGRIKEALLSAPALALPDLTKPFALYVDEKEGVARGVLTQTLGPWRRPVAYLSKKLDPVASGWPTCLKAIAAVALLLKDADKLTLGQNVLVIAPHNLESIVRQPPDRWMTNARMTHYQSLLLNERVSFAPPAILNPATLLPVESDDTPIHICSEILAEETGTRPDLRDQPLPGVPAWYTDGSSFIMDGRRQAGAAIVDNKRTVWASNLPEGTSAQKAELIALTQALRLAEGKSINIYTDSRYAFATAHVHGAIYKQRGLLTSAGKDIKNKEEILALLEAIHLPKRVAIIHCPGHQRGTDPVATGNRKADEAAKQAAQSTRILTETTKNAGKRTADGSEFEKRTADGSEFESPKKKAKVE

SEQ ID NO: 7048 - protein, 2096 aa, synthetic construct
MPAAKRVKLDGGDKKYSIGLDIGTNSVGWAVITDEYKVPSKKFKVLGNTDRHSIKKNLIGALLFDSGETAEATRLKRTARRRYTRRKNRICYLQEIFSNEMAKVDDSFFHRLEESFLVEEDKKHERHPIFGNIVDEVAYHEKYPTIYHLRKKLVDSTDKADLRLIYLALAHMIKFRGHFLIEGDLNPDNSDVDKLFIQLVQTYNQLFEENPINASGVDAKAILSARLSKSRRLENLIAQLPGEKKNGLFGNLIALSLGLTPNFKSNFDLAEDAKLQLSKDTYDDDLDNLLAQIGDQYADLFLAAKNLSDAILLSDILRVNTEITKAPLSASMIKRYDEHHQDLTLLKALVRQQLPEKYKEIFFDQSKNGYAGYIDGGASQEEFYKFIKPILEKMDGTEELLVKLNREDLLRKQRTFDNGSIPHQIHLGELHAILRRQEDFYPFLKDNREKIEKILTFRIPYYVGPLARGNSRFAWMTRKSEETITPWNFEEVVDKGASAQSFIERMTNFDKNLPNEKVLPKHSLLYEYFTVYNELTKVKYVTEGMRKPAFLSGEQKKAIVDLLFKTNRKVTVKQLKEDYFKKIECFDSVEISGVEDRFNASLGTYHDLLKIIKDKDFLDNEENEDILEDIVLTLTLFEDREMIEERLKTYAHLFDDKVMKQLKRRRYTGWGRLSRKLINGIRDKQSGKTILDFLKSDGFANRNFMQLIHDDSLTFKEDIQKAQVSGQGDSLHEHIANLAGSPAIKKGILQTVKVVDELVKVMGRHKPENIVIEMARENQTTQKGQKNSRERMKRIEEGIKELGSQILKEHPVENTQLQNEKLYLYYLQNGRDMYVDQELDINRLSDYDVDHIVPQSFLKDDSIDNKVLTRSDKARGKSDNVPSEEVVKKMKNYWRQLLNAKLITQRKFDNLTKAERGGLSELDKAGFIKRQLVETRQITKHVAQILDSRMNTKYDENDKLIREVKVITLKSKLVSDFRKDFQFYKVREINNYHHAHDAYLNAVVGTALIKKYPKLESEFVYGDYKVYDVRKMIAKSEQEIGKATAKYFFYSNIMNFFKTEITLANGEIRKRPLIETNGETGEIVWDKGRDFATVRKVLSMPQVNIVKKTEVQTGGFSKESILPKRNSDKLIARKKDWDPKKYGGFDSPTVAYSVLVVAKVEKGKSKKLKSVKELLGITIMERSSFEKNPIDFLEAKGYKEVKKDLIIKLPKYSLFELENGRKRMLASAGELQKGNELALPSKYVNFLYLASHYEKLKGSPEDNEQKQLFVEQHKHYLDEIIEQISEFSKRVILADANLDKVLSAYNKHRDKPIREQAENIIHLFTLTNLGAPAAFKYFDTTIDRKRYTSTKEVLDATLIHQSITGLYETRIDLSQLGGDGGGGSGSSEAAAKGGTLGIEDEYRLHETSTEPDVSLGSTWLSDFPQAWAETGGMGLAVRQAPLIIPLKATSTPVSIQQYPMSHEARLGIKPHIQRLLDQGILVPCQSPWNTPLLPVKKPGTNDYRPVQDLREVNKRVEDIHPTVPNPYNLLSGLPPSHQWYTVLDLKDAFFCLRLHPTSQPLFAFEWRDPGMGISGQLTWTRLPQGFKNSPTLFNEALHRDLADFRIQHPDLILLQYVDDILLAATSELDCQQGTRALLQTLGDLGYRASAKKAQICQKQVKYLGYLLREGQRWLTEARKETVMGQPVPKTPRQLREFLGTAGFCRLWIPGFAEMAAPLYPLTKPGTLFSWGPDQQKAYQEIKQALLTAPALGLPDLTKPFELFVDEKQGYAKGVLTQKLGPWRRPVAYLSKKLDPVAAGWPPCLRMVAAIAVLTKDAGKLTMGQPLVILAPHAVEALVKQPPDRWLSNARMTHYQAMLLDTDRVQFGPVVALNPATLLPLPEEGAPHDCLEILAETHGTRPDLTDQPIPDADHTWYTDGSSFLQEGQRKAGAAVTTETEVIWAGALPAGTSAQRAELIALTQALKMAEGKRLNVYTDSRYAFATAHIHGEIYRRRGWLTSEGREIKNKSEILALLKALFLPKRLSIIHCLGHQKGDSAEARGNRLADQAAREAAIKTPPDTSTLLAGKRTADGSEFEKRTADGSEFESPKKKAKVE

SEQ ID NO: 7049 - protein, 2096 aa, synthetic construct
MPAAKRVKLDGGDKKYSIGLDIGTNSVGWAVITDEYKVPSKKFKVLGNTDRHSIKKNLIGALLFDSGETAEATRLKRTARRRYTRRKNRICYLQEIFSNEMAKVDDSFFHRLEESFLVEEDKKHERHPIFGNIVDEVAYHEKYPTIYHLRKKLVDSTDKADLRLIYLALAHMIKFRGHFLIEGDLNPDNSDVDKLFIQLVQTYNQLFEENPINASGVDAKAILSARLSKSRRLENLIAQLPGEKKNGLFGNLIALSLGLTPNFKSNFDLAEDAKLQLSKDTYDDDLDNLLAQIGDQYADLFLAAKNLSDAILLSDILRVNTEITKAPLSASMIKRYDEHHQDLTLLKALVRQQLPEKYKEIFFDQSKNGYAGYIDGGASQEEFYKFIKPILEKMDGTEELLVKLNREDLLRKQRTFDNGSIPHQIHLGELHAILRRQEDFYPFLKDNREKIEKILTFRIPYYVGPLARGNSRFAWMTRKSEETITPWNFEEVVDKGASAQSFIERMTNFDKNLPNEKVLPKHSLLYEYFTVYNELTKVKYVTEGMRKPAFLSGEQKKAIVDLLFKTNRKVTVKQLKEDYFKKIECFDSVEISGVEDRFNASLGTYHDLLKIIKDKDFLDNEENEDILEDIVLTLTLFEDREMIEERLKTYAHLFDDKVMKQLKRRRYTGWGRLSRKLINGIRDKQSGKTILDFLKSDGFANRNFMQLIHDDSLTFKEDIQKAQVSGQGDSLHEHIANLAGSPAIKKGILQTVKVVDELVKVMGRHKPENIVIEMARENQTTQKGQKNSRERMKRIEEGIKELGSQILKEHPVENTQLQNEKLYLYYLQNGRDMYVDQELDINRLSDYDVDHIVPQSFLKDDSIDNKVLTRSDKARGKSDNVPSEEVVKKMKNYWRQLLNAKLITQRKFDNLTKAERGGLSELDKAGFIKRQLVETRQITKHVAQILDSRMNTKYDENDKLIREVKVITLKSKLVSDFRKDFQFYKVREINNYHHAHDAYLNAVVGTALIKKYPKLESEFVYGDYKVYDVRKMIAKSEQEIGKATAKYFFYSNIMNFFKTEITLANGEIRKRPLIETNGETGEIVWDKGRDFATVRKVLSMPQVNIVKKTEVQTGGFSKESILPKRNSDKLIARKKDWDPKKYGGFDSPTVAYSVLVVAKVEKGKSKKLKSVKELLGITIMERSSFEKNPIDFLEAKGYKEVKKDLIIKLPKYSLFELENGRKRMLASAGELQKGNELALPSKYVNFLYLASHYEKLKGSPEDNEQKQLFVEQHKHYLDEIIEQISEFSKRVILADANLDKVLSAYNKHRDKPIREQAENIIHLFTLTNLGAPAAFKYFDTTIDRKRYTSTKEVLDATLIHQSITGLYETRIDLSQLGGDGGGGSGSSEAAAKGGTLNIEDEYRLHEISTEPDVSPGSTWLSDFPQAWAETGGMGLAVRQAPLIIPLKATSTPVSIKQYPMSQEAKLGIKPHIQRLLDQGILVPCQSPWNTPLLPVKKPGTNDYRPVQGLREVNKRVEDIHPTVPNPYNLLSGLPTSHRWYTVLDLKDAFFCLRLHPTSQPLFASEWRDPGMGISGQLTWTRLPQGFKNSPTLFNEALHRGLADFRIQHPDLILLQYVDDLLLAATSELDCQQGTRALLKTLGNLGYRASAKKAQICQKQVKYLGYLLREGQRWLTEARKETVMGQPTPKTPRQLREFLGKAGFCRLFIPRFAEMAAPLYPLTKPGTLFNWGPDQQKAYHEIKQALLTAPALGLPDLTKPFELFVDEKQGYAKGVLTQKLGPWRRPVAYLSKKLDPVAAGWPPCLRMVAAIAVLTKDAGKLTMGQPLVILAPHAVEALVKQPPDRWLSNARMTHYQAMLLDTDRVQFGPVVALNPATLLPLPEEGAPHDCLEILAETHGTEPDLTDQPIPDADHTWYTDGSSFLQEGQRKAGAAVTTETEVIWARALPAGTSAQRAELIALTQALKMAEGKRLNVYTDSRYAFATAHIHGEIYKRRGWLTSEGREIKNKSEILALLKALFLPKRLSIIHCLGHQKGDSAEARGNRLADQAAREAAIKTPPDTSTLLAGKRTADGSEFEKRTADGSEFESPKKKAKVE

SEQ ID NO: 7050 - protein, 2090 aa, synthetic construct
MPAAKRVKLDGGDKKYSIGLDIGTNSVGWAVITDEYKVPSKKFKVLGNTDRHSIKKNLIGALLFDSGETAEATRLKRTARRRYTRRKNRICYLQEIFSNEMAKVDDSFFHRLEESFLVEEDKKHERHPIFGNIVDEVAYHEKYPTIYHLRKKLVDSTDKADLRLIYLALAHMIKFRGHFLIEGDLNPDNSDVDKLFIQLVQTYNQLFEENPINASGVDAKAILSARLSKSRRLENLIAQLPGEKKNGLFGNLIALSLGLTPNFKSNFDLAEDAKLQLSKDTYDDDLDNLLAQIGDQYADLFLAAKNLSDAILLSDILRVNTEITKAPLSASMIKRYDEHHQDLTLLKALVRQQLPEKYKEIFFDQSKNGYAGYIDGGASQEEFYKFIKPILEKMDGTEELLVKLNREDLLRKQRTFDNGSIPHQIHLGELHAILRRQEDFYPFLKDNREKIEKILTFRIPYYVGPLARGNSRFAWMTRKSEETITPWNFEEVVDKGASAQSFIERMTNFDKNLPNEKVLPKHSLLYEYFTVYNELTKVKYVTEGMRKPAFLSGEQKKAIVDLLFKTNRKVTVKQLKEDYFKKIECFDSVEISGVEDRFNASLGTYHDLLKIIKDKDFLDNEENEDILEDIVLTLTLFEDREMIEERLKTYAHLFDDKVMKQLKRRRYTGWGRLSRKLINGIRDKQSGKTILDFLKSDGFANRNFMQLIHDDSLTFKEDIQKAQVSGQGDSLHEHIANLAGSPAIKKGILQTVKVVDELVKVMGRHKPENIVIEMARENQTTQKGQKNSRERMKRIEEGIKELGSQILKEHPVENTQLQNEKLYLYYLQNGRDMYVDQELDINRLSDYDVDHIVPQSFLKDDSIDNKVLTRSDKARGKSDNVPSEEVVKKMKNYWRQLLNAKLITQRKFDNLTKAERGGLSELDKAGFIKRQLVETRQITKHVAQILDSRMNTKYDENDKLIREVKVITLKSKLVSDFRKDFQFYKVREINNYHHAHDAYLNAVVGTALIKKYPKLESEFVYGDYKVYDVRKMIAKSEQEIGKATAKYFFYSNIMNFFKTEITLANGEIRKRPLIETNGETGEIVWDKGRDFATVRKVLSMPQVNIVKKTEVQTGGFSKESILPKRNSDKLIARKKDWDPKKYGGFDSPTVAYSVLVVAKVEKGKSKKLKSVKELLGITIMERSSFEKNPIDFLEAKGYKEVKKDLIIKLPKYSLFELENGRKRMLASAGELQKGNELALPSKYVNFLYLASHYEKLKGSPEDNEQKQLFVEQHKHYLDEIIEQISEFSKRVILADANLDKVLSAYNKHRDKPIREQAENIIHLFTLTNLGAPAAFKYFDTTIDRKRYTSTKEVLDATLIHQSITGLYETRIDLSQLGGDGGGGSGSSEAAAKGGTLQLDDEYRLYSPLVKPDQNIQFWLEQFPQAWAETAGMGLAKQVPPQVIQLKASATPVSVRQYPLSKEAQEGIRPHVQRLIQQGILVPVQSPWNTPLLPVRKPGTNDYRPVQDLREVNKRVQDIHPTVPNPYNLLCALPPQRSWYTVLDLKDAFFCLRLHPTSQPLFAFEWRDPGTGRTGQLTWTRLPQGFKNSPTIFDEALHRDLANFRIQHPQVTLLQYVDDLLLAGATKQDCLEGTKALLLELSDLGYRASAKKAQICRREVTYLGYSLRDGQRWLTEARKKTVVQIPAPTTAKQVREFLGTAGFCRLWIPGFATLAAPLYPLTKEKGEFSWAPEHQKAFDAIKKALLSAPALALPDVTKPFTLYVDERKGVARGVLTQTLGPWRRPVAYLSKKLDPVASGWPVCLKAIAAVAILVKDADKLTLGQNITVIAPHALENIVRQPPDRWMTNARMTHYQSLLLTERVTFAPPAALNPATLLPEETDEPVTHDCHQLLIEETGVRKDLTDIPLTGEVLTWFTDGSSYVVEGKRMAGAAVVDGTRTIWASSLPEGTSAQKAELMALTQALRLAEGKSINIYTDSRYAFATAHVHGAIYKQRGLLTSAGREIKNKEEILSLLEALHLPKRLAIIHCPGHQKAKDPISRGNQMADRVAKQAAQGVNLLAGKRTADGSEFEKRTADGSEFESPKKKAKVE

SEQ ID NO: 7051 - protein, 2087 aa, synthetic construct
MPAAKRVKLDGGDKKYSIGLDIGTNSVGWAVITDEYKVPSKKFKVLGNTDRHSIKKNLIGALLFDSGETAEATRLKRTARRRYTRRKNRICYLQEIFSNEMAKVDDSFFHRLEESFLVEEDKKHERHPIFGNIVDEVAYHEKYPTIYHLRKKLVDSTDKADLRLIYLALAHMIKFRGHFLIEGDLNPDNSDVDKLFIQLVQTYNQLFEENPINASGVDAKAILSARLSKSRRLENLIAQLPGEKKNGLFGNLIALSLGLTPNFKSNFDLAEDAKLQLSKDTYDDDLDNLLAQIGDQYADLFLAAKNLSDAILLSDILRVNTEITKAPLSASMIKRYDEHHQDLTLLKALVRQQLPEKYKEIFFDQSKNGYAGYIDGGASQEEFYKFIKPILEKMDGTEELLVKLNREDLLRKQRTFDNGSIPHQIHLGELHAILRRQEDFYPFLKDNREKIEKILTFRIPYYVGPLARGNSRFAWMTRKSEETITPWNFEEVVDKGASAQSFIERMTNFDKNLPNEKVLPKHSLLYEYFTVYNELTKVKYVTEGMRKPAFLSGEQKKAIVDLLFKTNRKVTVKQLKEDYFKKIECFDSVEISGVEDRFNASLGTYHDLLKIIKDKDFLDNEENEDILEDIVLTLTLFEDREMIEERLKTYAHLFDDKVMKQLKRRRYTGWGRLSRKLINGIRDKQSGKTILDFLKSDGFANRNFMQLIHDDSLTFKEDIQKAQVSGQGDSLHEHIANLAGSPAIKKGILQTVKVVDELVKVMGRHKPENIVIEMARENQTTQKGQKNSRERMKRIEEGIKELGSQILKEHPVENTQLQNEKLYLYYLQNGRDMYVDQELDINRLSDYDVDHIVPQSFLKDDSIDNKVLTRSDKARGKSDNVPSEEVVKKMKNYWRQLLNAKLITQRKFDNLTKAERGGLSELDKAGFIKRQLVETRQITKHVAQILDSRMNTKYDENDKLIREVKVITLKSKLVSDFRKDFQFYKVREINNYHHAHDAYLNAVVGTALIKKYPKLESEFVYGDYKVYDVRKMIAKSEQEIGKATAKYFFYSNIMNFFKTEITLANGEIRKRPLIETNGETGEIVWDKGRDFATVRKVLSMPQVNIVKKTEVQTGGFSKESILPKRNSDKLIARKKDWDPKKYGGFDSPTVAYSVLVVAKVEKGKSKKLKSVKELLGITIMERSSFEKNPIDFLEAKGYKEVKKDLIIKLPKYSLFELENGRKRMLASAGELQKGNELALPSKYVNFLYLASHYEKLKGSPEDNEQKQLFVEQHKHYLDEIIEQISEFSKRVILADANLDKVLSAYNKHRDKPIREQAENIIHLFTLTNLGAPAAFKYFDTTIDRKRYTSTKEVLDATLIHQSITGLYETRIDLSQLGGDGGGGSGSSEAAAKGGIPWLMKKPLQLTTLVPLQEYEERLLKQTMLTGSYKEKLQSLFLKYDALWQHWENQVGHRRIKPHHIATGTVNPRPQKQYPINPKAKASIQTVINDLLKQGVLIQQNSIMNTPVYPVPKPDGKWRMVLDYREVNKTIPLIAAQNQHSAGILSSIFRGKYKTTLDLSNGFWAHSITPESYWLTAFTWLGQQYCWTRLPQGFLNSPALFNADVVDLLKEVPNVQVYVDDIYISHDDPREHLEQLEKVFSLLLNAGYVVSLKKSEIAQHEVEFLGFNITKEGRGLTETFKQKLLNITPPRDLKQLQSILGLLNFARNFIPNFSELVKPLYNIIATAPGKYITWTTDNSQQLQNIISMLNSAENLEERNPEVRLIMKVNTSPSAGYIRFYNEFAKRPIMYLNYVYTKAEVKFTNTEKLLTTIHKGLIKALDLGMGQEILVYSPIVSMTKIQKTPLPERKALPIRWITWMSYLEDPRIQFHYDKTLPELQQVPTVTDDIIAKIKHPSEFSMVFYTDGSAIKHPNVNKSHNAGMGIAQVQFKPEFTVINTWSIPLGDHTAQLAEVAAVEFACKKALKIDGPVLIVTDSFYVAESVNKELPYWQSNGFFNNKKKPLKHVSKWKSIADCIQLKPDIIIIHEKGHQPTASTFHTEGNNLADKLATQGSYVVNAGKRTADGSEFEKRTADGSEFESPKKKAKVE

SEQ ID NO: 7052 - protein, 2098 aa, synthetic construct
MPAAKRVKLDGGDKKYSIGLDIGTNSVGWAVITDEYKVPSKKFKVLGNTDRHSIKKNLIGALLFDSGETAEATRLKRTARRRYTRRKNRICYLQEIFSNEMAKVDDSFFHRLEESFLVEEDKKHERHPIFGNIVDEVAYHEKYPTIYHLRKKLVDSTDKADLRLIYLALAHMIKFRGHFLIEGDLNPDNSDVDKLFIQLVQTYNQLFEENPINASGVDAKAILSARLSKSRRLENLIAQLPGEKKNGLFGNLIALSLGLTPNFKSNFDLAEDAKLQLSKDTYDDDLDNLLAQIGDQYADLFLAAKNLSDAILLSDILRVNTEITKAPLSASMIKRYDEHHQDLTLLKALVRQQLPEKYKEIFFDQSKNGYAGYIDGGASQEEFYKFIKPILEKMDGTEELLVKLNREDLLRKQRTFDNGSIPHQIHLGELHAILRRQEDFYPFLKDNREKIEKILTFRIPYYVGPLARGNSRFAWMTRKSEETITPWNFEEVVDKGASAQSFIERMTNFDKNLPNEKVLPKHSLLYEYFTVYNELTKVKYVTEGMRKPAFLSGEQKKAIVDLLFKTNRKVTVKQLKEDYFKKIECFDSVEISGVEDRFNASLGTYHDLLKIIKDKDFLDNEENEDILEDIVLTLTLFEDREMIEERLKTYAHLFDDKVMKQLKRRRYTGWGRLSRKLINGIRDKQSGKTILDFLKSDGFANRNFMQLIHDDSLTFKEDIQKAQVSGQGDSLHEHIANLAGSPAIKKGILQTVKVVDELVKVMGRHKPENIVIEMARENQTTQKGQKNSRERMKRIEEGIKELGSQILKEHPVENTQLQNEKLYLYYLQNGRDMYVDQELDINRLSDYDVDHIVPQSFLKDDSIDNKVLTRSDKARGKSDNVPSEEVVKKMKNYWRQLLNAKLITQRKFDNLTKAERGGLSELDKAGFIKRQLVETRQITKHVAQILDSRMNTKYDENDKLIREVKVITLKSKLVSDFRKDFQFYKVREINNYHHAHDAYLNAVVGTALIKKYPKLESEFVYGDYKVYDVRKMIAKSEQEIGKATAKYFFYSNIMNFFKTEITLANGEIRKRPLIETNGETGEIVWDKGRDFATVRKVLSMPQVNIVKKTEVQTGGFSKESILPKRNSDKLIARKKDWDPKKYGGFDSPTVAYSVLVVAKVEKGKSKKLKSVKELLGITIMERSSFEKNPIDFLEAKGYKEVKKDLIIKLPKYSLFELENGRKRMLASAGELQKGNELALPSKYVNFLYLASHYEKLKGSPEDNEQKQLFVEQHKHYLDEIIEQISEFSKRVILADANLDKVLSAYNKHRDKPIREQAENIIHLFTLTNLGAPAAFKYFDTTIDRKRYTSTKEVLDATLIHQSITGLYETRIDLSQLGGDGGGGSEAAAKGSSGGTAPLEEEYRLFLEAPIQNVTLLEQWKREIPKVWAEINPPGLASTQAPIHVQLLSTALPVRVRQYPITLEAKRSLRETIRKFRAAGILRPVHSPWNTPLLPVRKSGTSEYRMVQDLREVNKRVETIHPTVPNPYTLLSLLPPDRIWYSVLDLKDAFFCIPLAPESQLIFAFEWADAEEGESGQLTWTRLPQGFKNSPTLFDEALNRDLQGFRLDHPSVSLLQYVDDLLIAADTQAACLSATRDLLMTLAELGYRVSGKKAQLCQEEVTYLGFKIHKGSRSLSNSRTQAILQIPVPKTKRQVREFLGTIGYCRLWIPGFAELAQPLYAATRGGNDPLVWGEKEEEAFQSLKLALTQPPALALPSLDKPFQLFVEETSGAAKGVLTQALGPWKRPVAYLSKRLDPVAAGWPRCLRAIAAAALLTREASKLTFGQDIEITSSHNLESLLRSPPDKWLTNARITQYQVLLLDPPRVRFKQTAALNPATLLPETDDTLPIHHCLDTLDSLTSTRPDLTDQPLAQAEATLFTDGSSYIRDGKRYAGAAVVTLDSVIWAEPLPIGTSAQKAELIALTKALEWSKDKSVNIYTDSRYAFATLHVHGMIYRERGLLTAGGKAIKNAPEILALLTAVWLPKRVAVMHCKGHQKDDAPTSTGNRRADEVAREVAIRPLSTQATISAGKRTADGSEFEKRTADGSEFESPKKKAKVE

SEQ ID NO: 7053 - protein, 2098 aa, synthetic construct
MPAAKRVKLDGGDKKYSIGLDIGTNSVGWAVITDEYKVPSKKFKVLGNTDRHSIKKNLIGALLFDSGETAEATRLKRTARRRYTRRKNRICYLQEIFSNEMAKVDDSFFHRLEESFLVEEDKKHERHPIFGNIVDEVAYHEKYPTIYHLRKKLVDSTDKADLRLIYLALAHMIKFRGHFLIEGDLNPDNSDVDKLFIQLVQTYNQLFEENPINASGVDAKAILSARLSKSRRLENLIAQLPGEKKNGLFGNLIALSLGLTPNFKSNFDLAEDAKLQLSKDTYDDDLDNLLAQIGDQYADLFLAAKNLSDAILLSDILRVNTEITKAPLSASMIKRYDEHHQDLTLLKALVRQQLPEKYKEIFFDQSKNGYAGYIDGGASQEEFYKFIKPILEKMDGTEELLVKLNREDLLRKQRTFDNGSIPHQIHLGELHAILRRQEDFYPFLKDNREKIEKILTFRIPYYVGPLARGNSRFAWMTRKSEETITPWNFEEVVDKGASAQSFIERMTNFDKNLPNEKVLPKHSLLYEYFTVYNELTKVKYVTEGMRKPAFLSGEQKKAIVDLLFKTNRKVTVKQLKEDYFKKIECFDSVEISGVEDRFNASLGTYHDLLKIIKDKDFLDNEENEDILEDIVLTLTLFEDREMIEERLKTYAHLFDDKVMKQLKRRRYTGWGRLSRKLINGIRDKQSGKTILDFLKSDGFANRNFMQLIHDDSLTFKEDIQKAQVSGQGDSLHEHIANLAGSPAIKKGILQTVKVVDELVKVMGRHKPENIVIEMARENQTTQKGQKNSRERMKRIEEGIKELGSQILKEHPVENTQLQNEKLYLYYLQNGRDMYVDQELDINRLSDYDVDHIVPQSFLKDDSIDNKVLTRSDKARGKSDNVPSEEVVKKMKNYWRQLLNAKLITQRKFDNLTKAERGGLSELDKAGFIKRQLVETRQITKHVAQILDSRMNTKYDENDKLIREVKVITLKSKLVSDFRKDFQFYKVREINNYHHAHDAYLNAVVGTALIKKYPKLESEFVYGDYKVYDVRKMIAKSEQEIGKATAKYFFYSNIMNFFKTEITLANGEIRKRPLIETNGETGEIVWDKGRDFATVRKVLSMPQVNIVKKTEVQTGGFSKESILPKRNSDKLIARKKDWDPKKYGGFDSPTVAYSVLVVAKVEKGKSKKLKSVKELLGITIMERSSFEKNPIDFLEAKGYKEVKKDLIIKLPKYSLFELENGRKRMLASAGELQKGNELALPSKYVNFLYLASHYEKLKGSPEDNEQKQLFVEQHKHYLDEIIEQISEFSKRVILADANLDKVLSAYNKHRDKPIREQAENIIHLFTLTNLGAPAAFKYFDTTIDRKRYTSTKEVLDATLIHQSITGLYETRIDLSQLGGDGGGGSEAAAKGSSGGTAPLEEEYRLFLEAPIQNVTLLEQWKREIPKVWAEINPPGLASTQAPIHVQLLSTALPVRVRQYPITLEAKRSLRETIRKFRAAGILRPVHSPWNTPLLPVRKSGTSEYRMVQDLREVNKRVETIHPTVPNPYTLLSLLPPDRIWYSVLDLKDAFFCIPLAPESQLIFAFEWADAEEGESGQLTWTRLPQGFKNSPTLFNEALNRDLQGFRLDHPSVSLLQYVDDLLIAADTQAACLSATRDLLMTLAELGYRVSGKKAQLCQEEVTYLGFKIHKGSRSLSNSRTQAILQIPVPKTKRQVREFLGTIGYCRLWIPGFAELAQPLYAATRPGNDPLVWGEKEEEAFQSLKLALTQPPALALPSLDKPFQLFVEETSGAAKGVLTQALGPWKRPVAYLSKRLDPVAAGWPRCLRAIAAAALLTREASKLTFGQDIEITSSHNLESLLRSPPDKWLTNARITQYQVLLLDPPRVRFKQTAALNPATLLPETDDTLPIHHCLDTLDSLTSTRPDLTDQPLAQAEATLFTDGSSYIRDGKRYAGAAVVTLDSVIWAEPLPIGTSAQKAELIALTKALEWSKDKSVNIYTDSRYAFATLHVHGMIYRERGWLTAGGKAIKNAPEILALLTAVWLPKRVAVMHCKGHQKDDAPTSTGNRRADEVAREVAIRPLSTQATISAGKRTADGSEFEKRTADGSEFESPKKKAKVE

SEQ ID NO: 7054 - protein, 2098 aa, synthetic construct
MPAAKRVKLDGGDKKYSIGLDIGTNSVGWAVITDEYKVPSKKFKVLGNTDRHSIKKNLIGALLFDSGETAEATRLKRTARRRYTRRKNRICYLQEIFSNEMAKVDDSFFHRLEESFLVEEDKKHERHPIFGNIVDEVAYHEKYPTIYHLRKKLVDSTDKADLRLIYLALAHMIKFRGHFLIEGDLNPDNSDVDKLFIQLVQTYNQLFEENPINASGVDAKAILSARLSKSRRLENLIAQLPGEKKNGLFGNLIALSLGLTPNFKSNFDLAEDAKLQLSKDTYDDDLDNLLAQIGDQYADLFLAAKNLSDAILLSDILRVNTEITKAPLSASMIKRYDEHHQDLTLLKALVRQQLPEKYKEIFFDQSKNGYAGYIDGGASQEEFYKFIKPILEKMDGTEELLVKLNREDLLRKQRTFDNGSIPHQIHLGELHAILRRQEDFYPFLKDNREKIEKILTFRIPYYVGPLARGNSRFAWMTRKSEETITPWNFEEVVDKGASAQSFIERMTNFDKNLPNEKVLPKHSLLYEYFTVYNELTKVKYVTEGMRKPAFLSGEQKKAIVDLLFKTNRKVTVKQLKEDYFKKIECFDSVEISGVEDRFNASLGTYHDLLKIIKDKDFLDNEENEDILEDIVLTLTLFEDREMIEERLKTYAHLFDDKVMKQLKRRRYTGWGRLSRKLINGIRDKQSGKTILDFLKSDGFANRNFMQLIHDDSLTFKEDIQKAQVSGQGDSLHEHIANLAGSPAIKKGILQTVKVVDELVKVMGRHKPENIVIEMARENQTTQKGQKNSRERMKRIEEGIKELGSQILKEHPVENTQLQNEKLYLYYLQNGRDMYVDQELDINRLSDYDVDHIVPQSFLKDDSIDNKVLTRSDKARGKSDNVPSEEVVKKMKNYWRQLLNAKLITQRKFDNLTKAERGGLSELDKAGFIKRQLVETRQITKHVAQILDSRMNTKYDENDKLIREVKVITLKSKLVSDFRKDFQFYKVREINNYHHAHDAYLNAVVGTALIKKYPKLESEFVYGDYKVYDVRKMIAKSEQEIGKATAKYFFYSNIMNFFKTEITLANGEIRKRPLIETNGETGEIVWDKGRDFATVRKVLSMPQVNIVKKTEVQTGGFSKESILPKRNSDKLIARKKDWDPKKYGGFDSPTVAYSVLVVAKVEKGKSKKLKSVKELLGITIMERSSFEKNPIDFLEAKGYKEVKKDLIIKLPKYSLFELENGRKRMLASAGELQKGNELALPSKYVNFLYLASHYEKLKGSPEDNEQKQLFVEQHKHYLDEIIEQISEFSKRVILADANLDKVLSAYNKHRDKPIREQAENIIHLFTLTNLGAPAAFKYFDTTIDRKRYTSTKEVLDATLIHQSITGLYETRIDLSQLGGDGGGGSEAAAKGSSGGTAPLEEEYRLFLEAPIQNVTLLEQWKREIPKVWAEINPPGLASTQAPIHVQLLSTALPVRVRQYPITLEAKRSLRETIRKFRAAGILRPVHSPWNTPLLPVRKSGTSEYRMVQDLREVNKRVETIHPTVPNPYTLLSLLPPDRIWYSVLDLKDAFFCIPLAPESQLIFAFEWADAEEGESGQLTWTRLPQGFKNSPTLFNEALNRDLQGFRLDHPSVSLLQYVDDLLIAADTQAACLSATRDLLMTLAELGYRVSGKKAQLCQEEVTYLGFKIHKGSRSLSNSRTQAILQIPVPKTKRQVREFLGKIGYCRLFIPGFAELAQPLYAATRPGNDPLVWGEKEEEAFQSLKLALTQPPALALPSLDKPFQLFVEETSGAAKGVLTQALGPWKRPVAYLSKRLDPVAAGWPRCLRAIAAAALLTREASKLTFGQDIEITSSHNLESLLRSPPDKWLTNARITQYQVLLLDPPRVRFKQTAALNPATLLPETDDTLPIHHCLDTLDSLTSTRPDLTDQPLAQAEATLFTDGSSYIRDGKRYAGAAVVTLDSVIWAEPLPIGTSAQKAELIALTKALEWSKDKSVNIYTDSRYAFATLHVHGMIYRERGWLTAGGKAIKNAPEILALLTAVWLPKRVAVMHCKGHQKDDAPTSTGNRRADEVAREVAIRPLSTQATISAGKRTADGSEFEKRTADGSEFESPKKKAKVE

SEQ ID NO: 7055 - protein, 2087 aa, synthetic construct
MPAAKRVKLDGGDKKYSIGLDIGTNSVGWAVITDEYKVPSKKFKVLGNTDRHSIKKNLIGALLFDSGETAEATRLKRTARRRYTRRKNRICYLQEIFSNEMAKVDDSFFHRLEESFLVEEDKKHERHPIFGNIVDEVAYHEKYPTIYHLRKKLVDSTDKADLRLIYLALAHMIKFRGHFLIEGDLNPDNSDVDKLFIQLVQTYNQLFEENPINASGVDAKAILSARLSKSRRLENLIAQLPGEKKNGLFGNLIALSLGLTPNFKSNFDLAEDAKLQLSKDTYDDDLDNLLAQIGDQYADLFLAAKNLSDAILLSDILRVNTEITKAPLSASMIKRYDEHHQDLTLLKALVRQQLPEKYKEIFFDQSKNGYAGYIDGGASQEEFYKFIKPILEKMDGTEELLVKLNREDLLRKQRTFDNGSIPHQIHLGELHAILRRQEDFYPFLKDNREKIEKILTFRIPYYVGPLARGNSRFAWMTRKSEETITPWNFEEVVDKGASAQSFIERMTNFDKNLPNEKVLPKHSLLYEYFTVYNELTKVKYVTEGMRKPAFLSGEQKKAIVDLLFKTNRKVTVKQLKEDYFKKIECFDSVEISGVEDRFNASLGTYHDLLKIIKDKDFLDNEENEDILEDIVLTLTLFEDREMIEERLKTYAHLFDDKVMKQLKRRRYTGWGRLSRKLINGIRDKQSGKTILDFLKSDGFANRNFMQLIHDDSLTFKEDIQKAQVSGQGDSLHEHIANLAGSPAIKKGILQTVKVVDELVKVMGRHKPENIVIEMARENQTTQKGQKNSRERMKRIEEGIKELGSQILKEHPVENTQLQNEKLYLYYLQNGRDMYVDQELDINRLSDYDVDHIVPQSFLKDDSIDNKVLTRSDKARGKSDNVPSEEVVKKMKNYWRQLLNAKLITQRKFDNLTKAERGGLSELDKAGFIKRQLVETRQITKHVAQILDSRMNTKYDENDKLIREVKVITLKSKLVSDFRKDFQFYKVREINNYHHAHDAYLNAVVGTALIKKYPKLESEFVYGDYKVYDVRKMIAKSEQEIGKATAKYFFYSNIMNFFKTEITLANGEIRKRPLIETNGETGEIVWDKGRDFATVRKVLSMPQVNIVKKTEVQTGGFSKESILPKRNSDKLIARKKDWDPKKYGGFDSPTVAYSVLVVAKVEKGKSKKLKSVKELLGITIMERSSFEKNPIDFLEAKGYKEVKKDLIIKLPKYSLFELENGRKRMLASAGELQKGNELALPSKYVNFLYLASHYEKLKGSPEDNEQKQLFVEQHKHYLDEIIEQISEFSKRVILADANLDKVLSAYNKHRDKPIREQAENIIHLFTLTNLGAPAAFKYFDTTIDRKRYTSTKEVLDATLIHQSITGLYETRIDLSQLGGDGGGGSEAAAKGSSGGVPWILKKPLELTIKLDLEEQQGTLLNNSILSKKGKEELKQLFEKYSALWQSWENQVGHRRIRPHKIATGTVKPTPQKQYHINPKAKPDIQIVINDLLKQGVLIQKESTMNTPVYPVPKPNGRWRMVLDYRAVNKVTPLIAVQNQHSYGILGSLFKGRYKTTIDLSNGFWAHPIVPEDYWITAFTWQGKQYCWTVLPQGFLNSPGLFTGDVVDLLQGIPNVEVYVDDVYISHDSEKEHLEYLDILFNRLKEAGYIISLKKSNIANSIVDFLGFQITNEGRGLTDTFKEKLENITAPTTLKQLQSILGLLNFARNFIPDFTELIAPLYALIPKSTKNYVPWQIEHSTTLETLITKLNGAEYLQGRKGDKTLIMKVNASYTTGYIRYYNEGEKKPISYVSIVFSKTELKFTELEKLLTTVHKGLLKALDLSMGQNIHVYSPIVSMQNIQKTPQTAKKALASRWLSWLSYLEDPRIRFFYDPQMPALKDLPAVDTGKDNKKHPSNFQHIFYTDGSAITSPTKEGHLNAGMGIVYFINKDGNLQKQQEWSISLGNHTAQFAEIAAFEFALKKCLPLGGNILVVTDSNYVAKAYNEELDVWASNGFVNNRKKPLKHISKWKSVADLKRLRPDVVVTHEPGHQKLDSSPHAYGNNLADQLATQASFKVHAGKRTADGSEFEKRTADGSEFESPKKKAKVE

SEQ ID NO: 7056 - protein, 2176 aa, synthetic construct
MPAAKRVKLDGGDKKYSIGLDIGTNSVGWAVITDEYKVPSKKFKVLGNTDRHSIKKNLIGALLFDSGETAEATRLKRTARRRYTRRKNRICYLQEIFSNEMAKVDDSFFHRLEESFLVEEDKKHERHPIFGNIVDEVAYHEKYPTIYHLRKKLVDSTDKADLRLIYLALAHMIKFRGHFLIEGDLNPDNSDVDKLFIQLVQTYNQLFEENPINASGVDAKAILSARLSKSRRLENLIAQLPGEKKNGLFGNLIALSLGLTPNFKSNFDLAEDAKLQLSKDTYDDDLDNLLAQIGDQYADLFLAAKNLSDAILLSDILRVNTEITKAPLSASMIKRYDEHHQDLTLLKALVRQQLPEKYKEIFFDQSKNGYAGYIDGGASQEEFYKFIKPILEKMDGTEELLVKLNREDLLRKQRTFDNGSIPHQIHLGELHAILRRQEDFYPFLKDNREKIEKILTFRIPYYVGPLARGNSRFAWMTRKSEETITPWNFEEVVDKGASAQSFIERMTNFDKNLPNEKVLPKHSLLYEYFTVYNELTKVKYVTEGMRKPAFLSGEQKKAIVDLLFKTNRKVTVKQLKEDYFKKIECFDSVEISGVEDRFNASLGTYHDLLKIIKDKDFLDNEENEDILEDIVLTLTLFEDREMIEERLKTYAHLFDDKVMKQLKRRRYTGWGRLSRKLINGIRDKQSGKTILDFLKSDGFANRNFMQLIHDDSLTFKEDIQKAQVSGQGDSLHEHIANLAGSPAIKKGILQTVKVVDELVKVMGRHKPENIVIEMARENQTTQKGQKNSRERMKRIEEGIKELGSQILKEHPVENTQLQNEKLYLYYLQNGRDMYVDQELDINRLSDYDVDHIVPQSFLKDDSIDNKVLTRSDKARGKSDNVPSEEVVKKMKNYWRQLLNAKLITQRKFDNLTKAERGGLSELDKAGFIKRQLVETRQITKHVAQILDSRMNTKYDENDKLIREVKVITLKSKLVSDFRKDFQFYKVREINNYHHAHDAYLNAVVGTALIKKYPKLESEFVYGDYKVYDVRKMIAKSEQEIGKATAKYFFYSNIMNFFKTEITLANGEIRKRPLIETNGETGEIVWDKGRDFATVRKVLSMPQVNIVKKTEVQTGGFSKESILPKRNSDKLIARKKDWDPKKYGGFDSPTVAYSVLVVAKVEKGKSKKLKSVKELLGITIMERSSFEKNPIDFLEAKGYKEVKKDLIIKLPKYSLFELENGRKRMLASAGELQKGNELALPSKYVNFLYLASHYEKLKGSPEDNEQKQLFVEQHKHYLDEIIEQISEFSKRVILADANLDKVLSAYNKHRDKPIREQAENIIHLFTLTNLGAPAAFKYFDTTIDRKRYTSTKEVLDATLIHQSITGLYETRIDLSQLGGDGGGGSEAAAKGSSGGMNPLQLLQPLPAEIKGTKLLAHWNSGATITCIPESFLEDEQPIKKTLIKTIHGEKQQNVYYVTFKVKGRKVEAEVIASPYEYILLSPTDVPWLTQQPLQLTILVPLQEYQEKILSKTALPEDQKQQLKTLFVKYDNLWQHWENQVGHRKIRPHNIATGDYPPRPQKQYPINPKAKPSIQIVIDDLLKQGVLTPQNSTMNTPVYPVPKPDGRWRMVLDYREVNKTIPLTAAQNQHSAGILATIVRQKYKTTLDLANGFWAHPITPESYWLTAFTWQGKQYCWTRLPQGFLNSPALFNADVVDLLKEIPNVQVYVDDIYLSHDDPKEHVQQLEKVFQILLQAGYVVSLKKSEIGQKTVEFLGFNITKEGRGLTDTFKTKLLNITPPKDLKQLQSILGKLNFARNFIPNFAELVQPLYNLIAPAKGKYIEWSEENTKQLNMVIEALNTASNLEERLPEQRLVIKVNTSPSAGYVRYYNETGKKPIMYLNYVFSKAELKFSMLEKLLTTMHKALIKAMDLAMGQEILVYSPIVSMTKIQKTPLPERKALPIRWITWMTYLEDPRIQFHYDKTLPELKHIPDVYTSSQSPVKHPSQYEGVFYTDGSAIKSPDPTKSNNAGMGIVHATYKPEYQVLNQWSIPLGNHTAQMAEIAAVEFACKKALKIPGPVLVITDSFYVAESANKELPYWKSNGFVNNKKKPLKHISKWKSIAECLSMKPDITIQHEKGISLQIPVFILKGNALADKLATQGSYVVNAGKRTADGSEFEKRTADGSEFESPKKKAKVE

SEQ ID NO: 7057 - protein, 2218 aa, synthetic construct
MPAAKRVKLDGGDKKYSIGLDIGTNSVGWAVITDEYKVPSKKFKVLGNTDRHSIKKNLIGALLFDSGETAEATRLKRTARRRYTRRKNRICYLQEIFSNEMAKVDDSFFHRLEESFLVEEDKKHERHPIFGNIVDEVAYHEKYPTIYHLRKKLVDSTDKADLRLIYLALAHMIKFRGHFLIEGDLNPDNSDVDKLFIQLVQTYNQLFEENPINASGVDAKAILSARLSKSRRLENLIAQLPGEKKNGLFGNLIALSLGLTPNFKSNFDLAEDAKLQLSKDTYDDDLDNLLAQIGDQYADLFLAAKNLSDAILLSDILRVNTEITKAPLSASMIKRYDEHHQDLTLLKALVRQQLPEKYKEIFFDQSKNGYAGYIDGGASQEEFYKFIKPILEKMDGTEELLVKLNREDLLRKQRTFDNGSIPHQIHLGELHAILRRQEDFYPFLKDNREKIEKILTFRIPYYVGPLARGNSRFAWMTRKSEETITPWNFEEVVDKGASAQSFIERMTNFDKNLPNEKVLPKHSLLYEYFTVYNELTKVKYVTEGMRKPAFLSGEQKKAIVDLLFKTNRKVTVKQLKEDYFKKIECFDSVEISGVEDRFNASLGTYHDLLKIIKDKDFLDNEENEDILEDIVLTLTLFEDREMIEERLKTYAHLFDDKVMKQLKRRRYTGWGRLSRKLINGIRDKQSGKTILDFLKSDGFANRNFMQLIHDDSLTFKEDIQKAQVSGQGDSLHEHIANLAGSPAIKKGILQTVKVVDELVKVMGRHKPENIVIEMARENQTTQKGQKNSRERMKRIEEGIKELGSQILKEHPVENTQLQNEKLYLYYLQNGRDMYVDQELDINRLSDYDVDHIVPQSFLKDDSIDNKVLTRSDKARGKSDNVPSEEVVKKMKNYWRQLLNAKLITQRKFDNLTKAERGGLSELDKAGFIKRQLVETRQITKHVAQILDSRMNTKYDENDKLIREVKVITLKSKLVSDFRKDFQFYKVREINNYHHAHDAYLNAVVGTALIKKYPKLESEFVYGDYKVYDVRKMIAKSEQEIGKATAKYFFYSNIMNFFKTEITLANGEIRKRPLIETNGETGEIVWDKGRDFATVRKVLSMPQVNIVKKTEVQTGGFSKESILPKRNSDKLIARKKDWDPKKYGGFDSPTVAYSVLVVAKVEKGKSKKLKSVKELLGITIMERSSFEKNPIDFLEAKGYKEVKKDLIIKLPKYSLFELENGRKRMLASAGELQKGNELALPSKYVNFLYLASHYEKLKGSPEDNEQKQLFVEQHKHYLDEIIEQISEFSKRVILADANLDKVLSAYNKHRDKPIREQAENIIHLFTLTNLGAPAAFKYFDTTIDRKRYTSTKEVLDATLIHQSITGLYETRIDLSQLGGDGGGGSEAAAKGSSGGTLGDQGSRGSDPLPEPRVTLTVEGIPTEFLVNTGAEHSVLTKPMGKMGSKRTVVAGATGSKVYPWTTKRLLKIGQKQVTHSFLVIPECPAPLLGRDLLTKLKAQIQFSTEGPQVTWEDRPAMCLVLNLEEEYRLHEKPVPPSIDPSWLQLFPMVWAEKAGMGLANQVPPVVVELKSDASPVAVRQYPMSKEAREGIRPHIQRFLDLGILVPCQSPWNTPLLPVKKPGTNDYRPVQDLREVNKRVQDIHPTVPNPYNLLSSLPPSHTWYSVLDLKDAFFCLKLHPNSQPLFAFEWRDPEKGNTGQLTWTRLPQGFKNSPTLFDEALHRDLASFRALNPQVVMLQYVDDLLVAAPTYRDCKEGTRRLLQELSKLGYRVSAKKAQLCREEVTYLGYLLKGGKRWLTPARKATVMKIPTPTTPRQVREFLGTAGFCRLWIPGFASLAAPLYPLTREKVPFTWTEAHQEAFGRIKEALLSAPALALPDLTKPFALYVDEKEGVARGVLTQTLGPWRRPVAYLSKKLDPVASGWPTCLKAIAAVALLLKDADKLTLGQNVLVIAPHNLESIVRQPPDRWMTNARMTHYQSLLLNERVSFAPPAILNPATLLPVESDDTPIHICSEILAEETGTRPDLRDQPLPGVPAWYTDGSSFIMDGRRQAGAAIVDNKRTVWASNLPEGTSAQKAELIALTQALRLAEGKSINIYTDSRYAFATAHVHGAIYKQRGLLTSAGKDIKNKEEILALLEAIHLPKRVAIIHCPGHQRGTDPVATGNRKADEAAKQAAQSTRILTETTKNAGKRTADGSEFEKRTADGSEFESPKKKAKVE

SEQ ID NO: 7058 - protein, 2127 aa, synthetic construct
MPAAKRVKLDGGDKKYSIGLDIGTNSVGWAVITDEYKVPSKKFKVLGNTDRHSIKKNLIGALLFDSGETAEATRLKRTARRRYTRRKNRICYLQEIFSNEMAKVDDSFFHRLEESFLVEEDKKHERHPIFGNIVDEVAYHEKYPTIYHLRKKLVDSTDKADLRLIYLALAHMIKFRGHFLIEGDLNPDNSDVDKLFIQLVQTYNQLFEENPINASGVDAKAILSARLSKSRRLENLIAQLPGEKKNGLFGNLIALSLGLTPNFKSNFDLAEDAKLQLSKDTYDDDLDNLLAQIGDQYADLFLAAKNLSDAILLSDILRVNTEITKAPLSASMIKRYDEHHQDLTLLKALVRQQLPEKYKEIFFDQSKNGYAGYIDGGASQEEFYKFIKPILEKMDGTEELLVKLNREDLLRKQRTFDNGSIPHQIHLGELHAILRRQEDFYPFLKDNREKIEKILTFRIPYYVGPLARGNSRFAWMTRKSEETITPWNFEEVVDKGASAQSFIERMTNFDKNLPNEKVLPKHSLLYEYFTVYNELTKVKYVTEGMRKPAFLSGEQKKAIVDLLFKTNRKVTVKQLKEDYFKKIECFDSVEISGVEDRFNASLGTYHDLLKIIKDKDFLDNEENEDILEDIVLTLTLFEDREMIEERLKTYAHLFDDKVMKQLKRRRYTGWGRLSRKLINGIRDKQSGKTILDFLKSDGFANRNFMQLIHDDSLTFKEDIQKAQVSGQGDSLHEHIANLAGSPAIKKGILQTVKVVDELVKVMGRHKPENIVIEMARENQTTQKGQKNSRERMKRIEEGIKELGSQILKEHPVENTQLQNEKLYLYYLQNGRDMYVDQELDINRLSDYDVDHIVPQSFLKDDSIDNKVLTRSDKARGKSDNVPSEEVVKKMKNYWRQLLNAKLITQRKFDNLTKAERGGLSELDKAGFIKRQLVETRQITKHVAQILDSRMNTKYDENDKLIREVKVITLKSKLVSDFRKDFQFYKVREINNYHHAHDAYLNAVVGTALIKKYPKLESEFVYGDYKVYDVRKMIAKSEQEIGKATAKYFFYSNIMNFFKTEITLANGEIRKRPLIETNGETGEIVWDKGRDFATVRKVLSMPQVNIVKKTEVQTGGFSKESILPKRNSDKLIARKKDWDPKKYGGFDSPTVAYSVLVVAKVEKGKSKKLKSVKELLGITIMERSSFEKNPIDFLEAKGYKEVKKDLIIKLPKYSLFELENGRKRMLASAGELQKGNELALPSKYVNFLYLASHYEKLKGSPEDNEQKQLFVEQHKHYLDEIIEQISEFSKRVILADANLDKVLSAYNKHRDKPIREQAENIIHLFTLTNLGAPAAFKYFDTTIDRKRYTSTKEVLDATLIHQSITGLYETRIDLSQLGGDGGGGSEAAAKGSSGGLLGRDLLTKLKAQIQFSTEGPQVTWEDRPAMCLVLNLEEEYRLHEKPVPPSIDPSWLQLFPMVWAEKAGMGLANQVPPVVVELKSDASPVAVRQYPMSKEAREGIRPHIQRFLDLGILVPCQSPWNTPLLPVKKPGTNDYRPVQDLREVNKRVQDIHPTVPNPYNLLSSLPPSHTWYSVLDLKDAFFCLKLHPNSQPLFAFEWRDPEKGNTGQLTWTRLPQGFKNSPTLFNEALHRDLASFRALNPQVVMLQYVDDLLVAAPTYRDCKEGTRRLLQELSKLGYRVSAKKAQLCREEVTYLGYLLKGGKRWLTPARKATVMKIPTPTTPRQVREFLGTAGFCRLWIPGFASLAAPLYPLTRPKVPFTWTEAHQEAFGRIKEALLSAPALALPDLTKPFALYVDEKEGVARGVLTQTLGPWRRPVAYLSKKLDPVASGWPTCLKAIAAVALLLKDADKLTLGQNVLVIAPHNLESIVRQPPDRWMTNARMTHYQSLLLNERVSFAPPAILNPATLLPVESDDTPIHICSEILAEETGTRPDLRDQPLPGVPAWYTDGSSFIMDGRRQAGAAIVDNKRTVWASNLPEGTSAQKAELIALTQALRLAEGKSINIYTDSRYAFATAHVHGAIYKQRGWLTSAGKDIKNKEEILALLEAIHLPKRVAIIHCPGHQRGTDPVATGNRKADEAAKQAAQSTRILTETTKNAGKRTADGSEFEKRTADGSEFESPKKKAKVE

SEQ ID NO: 7059 - protein, 2096 aa, synthetic construct
MPAAKRVKLDGGDKKYSIGLDIGTNSVGWAVITDEYKVPSKKFKVLGNTDRHSIKKNLIGALLFDSGETAEATRLKRTARRRYTRRKNRICYLQEIFSNEMAKVDDSFFHRLEESFLVEEDKKHERHPIFGNIVDEVAYHEKYPTIYHLRKKLVDSTDKADLRLIYLALAHMIKFRGHFLIEGDLNPDNSDVDKLFIQLVQTYNQLFEENPINASGVDAKAILSARLSKSRRLENLIAQLPGEKKNGLFGNLIALSLGLTPNFKSNFDLAEDAKLQLSKDTYDDDLDNLLAQIGDQYADLFLAAKNLSDAILLSDILRVNTEITKAPLSASMIKRYDEHHQDLTLLKALVRQQLPEKYKEIFFDQSKNGYAGYIDGGASQEEFYKFIKPILEKMDGTEELLVKLNREDLLRKQRTFDNGSIPHQIHLGELHAILRRQEDFYPFLKDNREKIEKILTFRIPYYVGPLARGNSRFAWMTRKSEETITPWNFEEVVDKGASAQSFIERMTNFDKNLPNEKVLPKHSLLYEYFTVYNELTKVKYVTEGMRKPAFLSGEQKKAIVDLLFKTNRKVTVKQLKEDYFKKIECFDSVEISGVEDRFNASLGTYHDLLKIIKDKDFLDNEENEDILEDIVLTLTLFEDREMIEERLKTYAHLFDDKVMKQLKRRRYTGWGRLSRKLINGIRDKQSGKTILDFLKSDGFANRNFMQLIHDDSLTFKEDIQKAQVSGQGDSLHEHIANLAGSPAIKKGILQTVKVVDELVKVMGRHKPENIVIEMARENQTTQKGQKNSRERMKRIEEGIKELGSQILKEHPVENTQLQNEKLYLYYLQNGRDMYVDQELDINRLSDYDVDHIVPQSFLKDDSIDNKVLTRSDKARGKSDNVPSEEVVKKMKNYWRQLLNAKLITQRKFDNLTKAERGGLSELDKAGFIKRQLVETRQITKHVAQILDSRMNTKYDENDKLIREVKVITLKSKLVSDFRKDFQFYKVREINNYHHAHDAYLNAVVGTALIKKYPKLESEFVYGDYKVYDVRKMIAKSEQEIGKATAKYFFYSNIMNFFKTEITLANGEIRKRPLIETNGETGEIVWDKGRDFATVRKVLSMPQVNIVKKTEVQTGGFSKESILPKRNSDKLIARKKDWDPKKYGGFDSPTVAYSVLVVAKVEKGKSKKLKSVKELLGITIMERSSFEKNPIDFLEAKGYKEVKKDLIIKLPKYSLFELENGRKRMLASAGELQKGNELALPSKYVNFLYLASHYEKLKGSPEDNEQKQLFVEQHKHYLDEIIEQISEFSKRVILADANLDKVLSAYNKHRDKPIREQAENIIHLFTLTNLGAPAAFKYFDTTIDRKRYTSTKEVLDATLIHQSITGLYETRIDLSQLGGDGGGGSEAAAKGSSGGTLGIEDEYRLHETSTEPDVSLGSTWLSDFPQAWAETGGMGLAVRQAPLIIPLKATSTPVSIQQYPMSHEARLGIKPHIQRLLDQGILVPCQSPWNTPLLPVKKPGTNDYRPVQDLREVNKRVEDIHPTVPNPYNLLSGLPPSHQWYTVLDLKDAFFCLRLHPTSQPLFAFEWRDPGMGISGQLTWTRLPQGFKNSPTLFDEALHRDLADFRIQHPDLILLQYVDDILLAATSELDCQQGTRALLQTLGDLGYRASAKKAQICQKQVKYLGYLLREGQRWLTEARKETVMGQPVPKTPRQLREFLGTAGFCRLWIPGFAEMAAPLYPLTKTGTLFSWGPDQQKAYQEIKQALLTAPALGLPDLTKPFELFVDEKQGYAKGVLTQKLGPWRRPVAYLSKKLDPVAAGWPPCLRMVAAIAVLTKDAGKLTMGQPLVILAPHAVEALVKQPPDRWLSNARMTHYQAMLLDTDRVQFGPVVALNPATLLPLPEEGAPHDCLEILAETHGTRPDLTDQPIPDADHTWYTDGSSFLQEGQRKAGAAVTTETEVIWAGALPAGTSAQRAELIALTQALKMAEGKRLNVYTDSRYAFATAHIHGEIYRRRGLLTSEGREIKNKSEILALLKALFLPKRLSIIHCLGHQKGDSAEARGNRLADQAAREAAIKTPPDTSTLLAGKRTADGSEFEKRTADGSEFESPKKKAKVE

SEQ ID NO: 7060 - protein, 2096 aa, synthetic construct
MPAAKRVKLDGGDKKYSIGLDIGTNSVGWAVITDEYKVPSKKFKVLGNTDRHSIKKNLIGALLFDSGETAEATRLKRTARRRYTRRKNRICYLQEIFSNEMAKVDDSFFHRLEESFLVEEDKKHERHPIFGNIVDEVAYHEKYPTIYHLRKKLVDSTDKADLRLIYLALAHMIKFRGHFLIEGDLNPDNSDVDKLFIQLVQTYNQLFEENPINASGVDAKAILSARLSKSRRLENLIAQLPGEKKNGLFGNLIALSLGLTPNFKSNFDLAEDAKLQLSKDTYDDDLDNLLAQIGDQYADLFLAAKNLSDAILLSDILRVNTEITKAPLSASMIKRYDEHHQDLTLLKALVRQQLPEKYKEIFFDQSKNGYAGYIDGGASQEEFYKFIKPILEKMDGTEELLVKLNREDLLRKQRTFDNGSIPHQIHLGELHAILRRQEDFYPFLKDNREKIEKILTFRIPYYVGPLARGNSRFAWMTRKSEETITPWNFEEVVDKGASAQSFIERMTNFDKNLPNEKVLPKHSLLYEYFTVYNELTKVKYVTEGMRKPAFLSGEQKKAIVDLLFKTNRKVTVKQLKEDYFKKIECFDSVEISGVEDRFNASLGTYHDLLKIIKDKDFLDNEENEDILEDIVLTLTLFEDREMIEERLKTYAHLFDDKVMKQLKRRRYTGWGRLSRKLINGIRDKQSGKTILDFLKSDGFANRNFMQLIHDDSLTFKEDIQKAQVSGQGDSLHEHIANLAGSPAIKKGILQTVKVVDELVKVMGRHKPENIVIEMARENQTTQKGQKNSRERMKRIEEGIKELGSQILKEHPVENTQLQNEKLYLYYLQNGRDMYVDQELDINRLSDYDVDHIVPQSFLKDDSIDNKVLTRSDKARGKSDNVPSEEVVKKMKNYWRQLLNAKLITQRKFDNLTKAERGGLSELDKAGFIKRQLVETRQITKHVAQILDSRMNTKYDENDKLIREVKVITLKSKLVSDFRKDFQFYKVREINNYHHAHDAYLNAVVGTALIKKYPKLESEFVYGDYKVYDVRKMIAKSEQEIGKATAKYFFYSNIMNFFKTEITLANGEIRKRPLIETNGETGEIVWDKGRDFATVRKVLSMPQVNIVKKTEVQTGGFSKESILPKRNSDKLIARKKDWDPKKYGGFDSPTVAYSVLVVAKVEKGKSKKLKSVKELLGITIMERSSFEKNPIDFLEAKGYKEVKKDLIIKLPKYSLFELENGRKRMLASAGELQKGNELALPSKYVNFLYLASHYEKLKGSPEDNEQKQLFVEQHKHYLDEIIEQISEFSKRVILADANLDKVLSAYNKHRDKPIREQAENIIHLFTLTNLGAPAAFKYFDTTIDRKRYTSTKEVLDATLIHQSITGLYETRIDLSQLGGDGGGGSEAAAKGSSGGTLNIEDEYRLHETSKGPDVPLGSTWLSDFPQAWAETGGMGLAVRQAPLIIPLKATSTPVSIKQYPMSQEARLGIKPHIQRLLDQGILVPCQSPWNTPLLPVKKPGTNDYRPVQDLREVNKRVEDIHPTVPNPYNLLSGLPPSHQWYTVLDLKDAFFCLRLHPTSQSLFAFEWRDPEMGISGQLTWTRLPQGFKNSPTLFNEALHRDLADFRIQHPDLILLQYVDDLLLAATSELDCQQGTRALLQTLGDLGYRASAKKAQICQKQVKYLGYLLKEGQRWLTEARKETVMGQPTPKTPRQLREFLGTAGFCRLWIPGFAEMAAPLYPLTKPGTLFEWGPDQQKAYQEIKQALLTAPALGLPDLTKPFELFVDEKQGYAKGVLTQKLGPWRRPVAYLSKKLDPVAAGWPPCLRMVAAIAVLTKDAGKLTMGQPLVILAPHAVEALVKQPPDRWLSNARMTHYQALLLDTDRVQFGPIVALNPATLLPLPEEGLQHDCLDILAEAHGTRPDLTDQPLPDADHTWYTDGSSFLQEGQRKAGAAVTTETEVVWAKALPAGTSAQRAELIALTQALKMAEGKKLNVYTDSRYAFATAHIHGEIYRRRGWLTSEGKEIKNKDEILALLKALFLPKRLSIIHCPGHQKGNRAEARGNRMADQAAREVATRETPETSTLLAGKRTADGSEFEKRTADGSEFESPKKKAKVE

SEQ ID NO: 7061 - protein, 2116 aa, synthetic construct
MPAAKRVKLDGGDKKYSIGLDIGTNSVGWAVITDEYKVPSKKFKVLGNTDRHSIKKNLIGALLFDSGETAEATRLKRTARRRYTRRKNRICYLQEIFSNEMAKVDDSFFHRLEESFLVEEDKKHERHPIFGNIVDEVAYHEKYPTIYHLRKKLVDSTDKADLRLIYLALAHMIKFRGHFLIEGDLNPDNSDVDKLFIQLVQTYNQLFEENPINASGVDAKAILSARLSKSRRLENLIAQLPGEKKNGLFGNLIALSLGLTPNFKSNFDLAEDAKLQLSKDTYDDDLDNLLAQIGDQYADLFLAAKNLSDAILLSDILRVNTEITKAPLSASMIKRYDEHHQDLTLLKALVRQQLPEKYKEIFFDQSKNGYAGYIDGGASQEEFYKFIKPILEKMDGTEELLVKLNREDLLRKQRTFDNGSIPHQIHLGELHAILRRQEDFYPFLKDNREKIEKILTFRIPYYVGPLARGNSRFAWMTRKSEETITPWNFEEVVDKGASAQSFIERMTNFDKNLPNEKVLPKHSLLYEYFTVYNELTKVKYVTEGMRKPAFLSGEQKKAIVDLLFKTNRKVTVKQLKEDYFKKIECFDSVEISGVEDRFNASLGTYHDLLKIIKDKDFLDNEENEDILEDIVLTLTLFEDREMIEERLKTYAHLFDDKVMKQLKRRRYTGWGRLSRKLINGIRDKQSGKTILDFLKSDGFANRNFMQLIHDDSLTFKEDIQKAQVSGQGDSLHEHIANLAGSPAIKKGILQTVKVVDELVKVMGRHKPENIVIEMARENQTTQKGQKNSRERMKRIEEGIKELGSQILKEHPVENTQLQNEKLYLYYLQNGRDMYVDQELDINRLSDYDVDHIVPQSFLKDDSIDNKVLTRSDKARGKSDNVPSEEVVKKMKNYWRQLLNAKLITQRKFDNLTKAERGGLSELDKAGFIKRQLVETRQITKHVAQILDSRMNTKYDENDKLIREVKVITLKSKLVSDFRKDFQFYKVREINNYHHAHDAYLNAVVGTALIKKYPKLESEFVYGDYKVYDVRKMIAKSEQEIGKATAKYFFYSNIMNFFKTEITLANGEIRKRPLIETNGETGEIVWDKGRDFATVRKVLSMPQVNIVKKTEVQTGGFSKESILPKRNSDKLIARKKDWDPKKYGGFDSPTVAYSVLVVAKVEKGKSKKLKSVKELLGITIMERSSFEKNPIDFLEAKGYKEVKKDLIIKLPKYSLFELENGRKRMLASAGELQKGNELALPSKYVNFLYLASHYEKLKGSPEDNEQKQLFVEQHKHYLDEIIEQISEFSKRVILADANLDKVLSAYNKHRDKPIREQAENIIHLFTLTNLGAPAAFKYFDTTIDRKRYTSTKEVLDATLIHQSITGLYETRIDLSQLGGDGGGGSEAAAKGSSGGWVQEISDSRPMLHIYLNGRRFLGLLNTGADKTCIAGRDWPANWPIHQTESSLQGLGMACGVARSSQPLRWQHEDKSGIIHPFVIPTLPFTLWGRDIMKDIKVRLMTDSPDDSQDLMIGAIESNLFADQISWKSDQPVWLNQWPLKQEKLQALQQLVTEQLQLGHLEESNSPWNTPVFVIKKKSGKWRLLQDLRAVNATMHDMGALQPGLPSPVAVPKGWEIIIIDLQDCFFNIKLHPEDCKRFAFSVPSPNFKRPYQRFQWKVLPQGMKNSPTLCQKFVDKAILTVRDKYQDSYIVHYMDDILLAHPSRSIVDEILTSMIQALNKHGLVVSTEKIQKYDNLKYLGTHIQGDSVSYQKLQIRTDKLRTLNDFQKLLGNINWIRPFLKLTTGELKPLFEILNGDSNPISTRKLTPEACKALQLMNERLSTARVKRLDLSQPWSLCILKTEYTPTACLWQDGVVEWIHLPHISPKVITPYDIFCTQLIIKGRHRSKELFSKDPDYIVVPYTKVQFDLLLQEKEDWPISLLGFLGEVHFHLPKDPLLTFTLQTAIIFPHMTSTTPLEKGIVIFTDGSANGRSVTYIQGREPIIKENTQNTAQQAEIVAVITAFEEVSQPFNLYTDSKYVTGLFPEIETATLSPRTKIYTELKHLQRLIHKRQEKFYIGHIRGHTGLPGPLAQGNAYADSLTRILTAGKRTADGSEFEKRTADGSEFESPKKKAKVE

SEQ ID NO: 7062 - protein, 2090 aa, synthetic construct
MPAAKRVKLDGGDKKYSIGLDIGTNSVGWAVITDEYKVPSKKFKVLGNTDRHSIKKNLIGALLFDSGETAEATRLKRTARRRYTRRKNRICYLQEIFSNEMAKVDDSFFHRLEESFLVEEDKKHERHPIFGNIVDEVAYHEKYPTIYHLRKKLVDSTDKADLRLIYLALAHMIKFRGHFLIEGDLNPDNSDVDKLFIQLVQTYNQLFEENPINASGVDAKAILSARLSKSRRLENLIAQLPGEKKNGLFGNLIALSLGLTPNFKSNFDLAEDAKLQLSKDTYDDDLDNLLAQIGDQYADLFLAAKNLSDAILLSDILRVNTEITKAPLSASMIKRYDEHHQDLTLLKALVRQQLPEKYKEIFFDQSKNGYAGYIDGGASQEEFYKFIKPILEKMDGTEELLVKLNREDLLRKQRTFDNGSIPHQIHLGELHAILRRQEDFYPFLKDNREKIEKILTFRIPYYVGPLARGNSRFAWMTRKSEETITPWNFEEVVDKGASAQSFIERMTNFDKNLPNEKVLPKHSLLYEYFTVYNELTKVKYVTEGMRKPAFLSGEQKKAIVDLLFKTNRKVTVKQLKEDYFKKIECFDSVEISGVEDRFNASLGTYHDLLKIIKDKDFLDNEENEDILEDIVLTLTLFEDREMIEERLKTYAHLFDDKVMKQLKRRRYTGWGRLSRKLINGIRDKQSGKTILDFLKSDGFANRNFMQLIHDDSLTFKEDIQKAQVSGQGDSLHEHIANLAGSPAIKKGILQTVKVVDELVKVMGRHKPENIVIEMARENQTTQKGQKNSRERMKRIEEGIKELGSQILKEHPVENTQLQNEKLYLYYLQNGRDMYVDQELDINRLSDYDVDHIVPQSFLKDDSIDNKVLTRSDKARGKSDNVPSEEVVKKMKNYWRQLLNAKLITQRKFDNLTKAERGGLSELDKAGFIKRQLVETRQITKHVAQILDSRMNTKYDENDKLIREVKVITLKSKLVSDFRKDFQFYKVREINNYHHAHDAYLNAVVGTALIKKYPKLESEFVYGDYKVYDVRKMIAKSEQEIGKATAKYFFYSNIMNFFKTEITLANGEIRKRPLIETNGETGEIVWDKGRDFATVRKVLSMPQVNIVKKTEVQTGGFSKESILPKRNSDKLIARKKDWDPKKYGGFDSPTVAYSVLVVAKVEKGKSKKLKSVKELLGITIMERSSFEKNPIDFLEAKGYKEVKKDLIIKLPKYSLFELENGRKRMLASAGELQKGNELALPSKYVNFLYLASHYEKLKGSPEDNEQKQLFVEQHKHYLDEIIEQISEFSKRVILADANLDKVLSAYNKHRDKPIREQAENIIHLFTLTNLGAPAAFKYFDTTIDRKRYTSTKEVLDATLIHQSITGLYETRIDLSQLGGDGGGGSEAAAKGSSGGTLQLDDEYRLYSPLVKPDQNIQFWLEQFPQAWAETAGMGLAKQVPPQVIQLKASATPVSVRQYPLSKEAQEGIRPHVQRLIQQGILVPVQSPWNTPLLPVRKPGTNDYRPVQDLREVNKRVQDIHPTVPNPYNLLCALPPQRSWYTVLDLKDAFFCLRLHPTSQPLFAFEWRDPGTGRTGQLTWTRLPQGFKNSPTIFDEALHRDLANFRIQHPQVTLLQYVDDLLLAGATKQDCLEGTKALLLELSDLGYRASAKKAQICRREVTYLGYSLRDGQRWLTEARKKTVVQIPAPTTAKQVREFLGTAGFCRLWIPGFATLAAPLYPLTKEKGEFSWAPEHQKAFDAIKKALLSAPALALPDVTKPFTLYVDERKGVARGVLTQTLGPWRRPVAYLSKKLDPVASGWPVCLKAIAAVAILVKDADKLTLGQNITVIAPHALENIVRQPPDRWMTNARMTHYQSLLLTERVTFAPPAALNPATLLPEETDEPVTHDCHQLLIEETGVRKDLTDIPLTGEVLTWFTDGSSYVVEGKRMAGAAVVDGTRTIWASSLPEGTSAQKAELMALTQALRLAEGKSINIYTDSRYAFATAHVHGAIYKQRGLLTSAGREIKNKEEILSLLEALHLPKRLAIIHCPGHQKAKDPISRGNQMADRVAKQAAQGVNLLAGKRTADGSEFEKRTADGSEFESPKKKAKVE

SEQ ID NO: 7063 - protein, 2090 aa, synthetic construct; identical to SEQ ID NO: 7062

SEQ ID NO: 7064 - protein, 2094 aa, synthetic construct
MPAAKRVKLDGGDKKYSIGLDIGTNSVGWAVITDEYKVPSKKFKVLGNTDRHSIKKNLIGALLFDSGETAEATRLKRTARRRYTRRKNRICYLQEIFSNEMAKVDDSFFHRLEESFLVEEDKKHERHPIFGNIVDEVAYHEKYPTIYHLRKKLVDSTDKADLRLIYLALAHMIKFRGHFLIEGDLNPDNSDVDKLFIQLVQTYNQLFEENPINASGVDAKAILSARLSKSRRLENLIAQLPGEKKNGLFGNLIALSLGLTPNFKSNFDLAEDAKLQLSKDTYDDDLDNLLAQIGDQYADLFLAAKNLSDAILLSDILRVNTEITKAPLSASMIKRYDEHHQDLTLLKALVRQQLPEKYKEIFFDQSKNGYAGYIDGGASQEEFYKFIKPILEKMDGTEELLVKLNREDLLRKQRTFDNGSIPHQIHLGELHAILRRQEDFYPFLKDNREKIEKILTFRIPYYVGPLARGNSRFAWMTRKSEETITPWNFEEVVDKGASAQSFIERMTNFDKNLPNEKVLPKHSLLYEYFTVYNELTKVKYVTEGMRKPAFLSGEQKKAIVDLLFKTNRKVTVKQLKEDYFKKIECFDSVEISGVEDRFNASLGTYHDLLKIIKDKDFLDNEENEDILEDIVLTLTLFEDREMIEERLKTYAHLFDDKVMKQLKRRRYTGWGRLSRKLINGIRDKQSGKTILDFLKSDGFANRNFMQLIHDDSLTFKEDIQKAQVSGQGDSLHEHIANLAGSPAIKKGILQTVKVVDELVKVMGRHKPENIVIEMARENQTTQKGQKNSRERMKRIEEGIKELGSQILKEHPVENTQLQNEKLYLYYLQNGRDMYVDQELDINRLSDYDVDHIVPQSFLKDDSIDNKVLTRSDKARGKSDNVPSEEVVKKMKNYWRQLLNAKLITQRKFDNLTKAERGGLSELDKAGFIKRQLVETRQITKHVAQILDSRMNTKYDENDKLIREVKVITLKSKLVSDFRKDFQFYKVREINNYHHAHDAYLNAVVGTALIKKYPKLESEFVYGDYKVYDVRKMIAKSEQEIGKATAKYFFYSNIMNFFKTEITLANGEIRKRPLIETNGETGEIVWDKGRDFATVRKVLSMPQVNIVKKTEVQTGGFSKESILPKRNSDKLIARKKDWDPKKYGGFDSPTVAYSVLVVAKVEKGKSKKLKSVKELLGITIMERSSFEKNPIDFLEAKGYKEVKKDLIIKLPKYSLFELENGRKRMLASAGELQKGNELALPSKYVNFLYLASHYEKLKGSPEDNEQKQLFVEQHKHYLDEIIEQISEFSKRVILADANLDKVLSAYNKHRDKPIREQAENIIHLFTLTNLGAPAAFKYFDTTIDRKRYTSTKEVLDATLIHQSITGLYETRIDLSQLGGDGGGGSEAAAKGSSGGVLNLEEEYRLHEKPVPSSIDPSWLQLFPTVWAERAGMGLANQVPPVVVELRSGASPVAVRQYPMSKEAREGIRPHIQRFLDLGVLVPCQSPWNTPLLPVKKPGTNDYRPVQDLREINKRVQDIHPTVPNPYNLLSSLPPSHTWYSVLDLKDAFFCLKLHPNSQPLFAFEWRDPEKGNTGQLTWTRLPQGFKNSPTLFNEALHRDLAPFRALNPQVVLLQYVDDLLVAAPTYRDCKEGTQKLLQELSKLGYRVSAKKAQLCQKEVTYLGYLLKEGKRWLTPARKATVMKIPPPTTPRQVREFLGTAGFCRLWIPGFASLAAPLYPLTKPSIPFIWTEEHQKAFDRIKEALLSAPALALPDLTKPFTLYVDERAGVARGVLTQTLGPWRRPVAYLSKKLDPVASGWPTCLKAVAAVALLLKDADKLTLGQNVTVIASHSLESIVRQPPDRWMTNARMTHYQSLLLNERVSFAPPAVLNPATLLPVESEATPVHRCSEILAEETGTRRDLKDQPLPGVPAWYTDGSSFIAEGKRRAGAAIVDGKRTVWASSLPEGTSAQKAELVALTQALRLAEGKDINIYTDSRYAFATAHIHGAIYKQRGWLTSAGKDIKNKEEILALLEAIHLPKRVAIIHCPGHQKGNDPVATGNRRADEAAKQAALSTRVLAETTKPAGKRTADGSEFEKRTADGSEFESPKKKAKVE

SEQ ID NO: 7065 - protein, 2094 aa, synthetic construct
MPAAKRVKLDGGDKKYSIGLDIGTNSVGWAVITDEYKVPSKKFKVLGNTDRHSIKKNLIGALLFDSGETAEATRLKRTARRRYTRRKNRICYLQEIFSNEMAKVDDSFFHRLEESFLVEEDKKHERHPIFGNIVDEVAYHEKYPTIYHLRKKLVDSTDKADLRLIYLALAHMIKFRGHFLIEGDLNPDNSDVDKLFIQLVQTYNQLFEENPINASGVDAKAILSARLSKSRRLENLIAQLPGEKKNGLFGNLIALSLGLTPNFKSNFDLAEDAKLQLSKDTYDDDLDNLLAQIGDQYADLFLAAKNLSDAILLSDILRVNTEITKAPLSASMIKRYDEHHQDLTLLKALVRQQLPEKYKEIFFDQSKNGYAGYIDGGASQEEFYKFIKPILEKMDGTEELLVKLNREDLLRKQRTFDNGSIPHQIHLGELHAILRRQEDFYPFLKDNREKIEKILTFRIPYYVGPLARGNSRFAWMTRKSEETITPWNFEEVVDKGASAQSFIERMTNFDKNLPNEKVLPKHSLLYEYFTVYNELTKVKYVTEGMRKPAFLSGEQKKAIVDLLFKTNRKVTVKQLKEDYFKKIECFDSVEISGVEDRFNASLGTYHDLLKIIKDKDFLDNEENEDILEDIVLTLTLFEDREMIEERLKTYAHLFDDKVMKQLKRRRYTGWGRLSRKLINGIRDKQSGKTILDFLKSDGFANRNFMQLIHDDSLTFKEDIQKAQVSGQGDSLHEHIANLAGSPAIKKGILQTVKVVDELVKVMGRHKPENIVIEMARENQTTQKGQKNSRERMKRIEEGIKELGSQILKEHPVENTQLQNEKLYLYYLQNGRDMYVDQELDINRLSDYDVDHIVPQSFLKDDSIDNKVLTRSDKARGKSDNVPSEEVVKKMKNYWRQLLNAKLITQRKFDNLTKAERGGLSELDKAGFIKRQLVETRQITKHVAQILDSRMNTKYDENDKLIREVKVITLKSKLVSDFRKDFQFYKVREINNYHHAHDAYLNAVVGTALIKKYPKLESEFVYGDYKVYDVRKMIAKSEQEIGKATAKYFFYSNIMNFFKTEITLANGEIRKRPLIETNGETGEIVWDKGRDFATVRKVLSMPQVNIVKKTEVQTGGFSKESILPKRNSDKLIARKKDWDPKKYGGFDSPTVAYSVLVVAKVEKGKSKKLKSVKELLGITIMERSSFEKNPIDFLEAKGYKEVKKDLIIKLPKYSLFELENGRKRMLASAGELQKGNELALPSKYVNFLYLASHYEKLKGSPEDNEQKQLFVEQHKHYLDEIIEQISEFSKRVILADANLDKVLSAYNKHRDKPIREQAENIIHLFTLTNLGAPAAFKYFDTTIDRKRYTSTKEVLDATLIHQSITGLYETRIDLSQLGGDGGGGSEAAAKGSSGGVLNLEEEYRLHEKPVPSSIDPSWLQLFPTVWAERAGMGLANQVPPVVVELRSGASPVAVRQYPMSKEAREGIRPHIQRFLDLGVLVPCQSPWNTPLLPVKKPGTNDYRPVQDLREINKRVQDIHPTVPNPYNLLSSLPPSHTWYSVLDLKDAFFCLKLHPNSQPLFAFEWRDPEKGNTGQLTWTRLPQGFKNSPTLFNEALHRDLAPFRALNPQVVLLQYVDDLLVAAPTYRDCKEGTQKLLQELSKLGYRVSAKKAQLCQKEVTYLGYLLKEGKRWLTPARKATVMKIPPPTTPRQVREFLGKAGFCRLFIPGFASLAAPLYPLTKPSIPFIWTEEHQKAFDRIKEALLSAPALALPDLTKPFTLYVDERAGVARGVLTQTLGPWRRPVAYLSKKLDPVASGWPTCLKAVAAVALLLKDADKLTLGQNVTVIASHSLESIVRQPPDRWMTNARMTHYQSLLLNERVSFAPPAVLNPATLLPVESEATPVHRCSEILAEETGTRRDLKDQPLPGVPAWYTDGSSFIAEGKRRAGAAIVDGKRTVWASSLPEGTSAQKAELVALTQALRLAEGKDINIYTDSRYAFATAHIHGAIYKQRGWLTSAGKDIKNKEEILALLEAIHLPKRVAIIHCPGHQKGNDPVATGNRRADEAAKQAALSTRVLAETTKPAGKRTADGSEFEKRTADGSEFESPKKKAKVE

SEQ ID NO: 7066 - protein, 2096 aa, synthetic construct
MPAAKRVKLDGGDKKYSIGLDIGTNSVGWAVITDEYKVPSKKFKVLGNTDRHSIKKNLIGALLFDSGETAEATRLKRTARRRYTRRKNRICYLQEIFSNEMAKVDDSFFHRLEESFLVEEDKKHERHPIFGNIVDEVAYHEKYPTIYHLRKKLVDSTDKADLRLIYLALAHMIKFRGHFLIEGDLNPDNSDVDKLFIQLVQTYNQLFEENPINASGVDAKAILSARLSKSRRLENLIAQLPGEKKNGLFGNLIALSLGLTPNFKSNFDLAEDAKLQLSKDTYDDDLDNLLAQIGDQYADLFLAAKNLSDAILLSDILRVNTEITKAPLSASMIKRYDEHHQDLTLLKALVRQQLPEKYKEIFFDQSKNGYAGYIDGGASQEEFYKFIKPILEKMDGTEELLVKLNREDLLRKQRTFDNGSIPHQIHLGELHAILRRQEDFYPFLKDNREKIEKILTFRIPYYVGPLARGNSRFAWMTRKSEETITPWNFEEVVDKGASAQSFIERMTNFDKNLPNEKVLPKHSLLYEYFTVYNELTKVKYVTEGMRKPAFLSGEQKKAIVDLLFKTNRKVTVKQLKEDYFKKIECFDSVEISGVEDRFNASLGTYHDLLKIIKDKDFLDNEENEDILEDIVLTLTLFEDREMIEERLKTYAHLFDDKVMKQLKRRRYTGWGRLSRKLINGIRDKQSGKTILDFLKSDGFANRNFMQLIHDDSLTFKEDIQKAQVSGQGDSLHEHIANLAGSPAIKKGILQTVKVVDELVKVMGRHKPENIVIEMARENQTTQKGQKNSRERMKRIEEGIKELGSQILKEHPVENTQLQNEKLYLYYLQNGRDMYVDQELDINRLSDYDVDHIVPQSFLKDDSIDNKVLTRSDKARGKSDNVPSEEVVKKMKNYWRQLLNAKLITQRKFDNLTKAERGGLSELDKAGFIKRQLVETRQITKHVAQILDSRMNTKYDENDKLIREVKVITLKSKLVSDFRKDFQFYKVREINNYHHAHDAYLNAVVGTALIKKYPKLESEFVYGDYKVYDVRKMIAKSEQEIGKATAKYFFYSNIMNFFKTEITLANGEIRKRPLIETNGETGEIVWDKGRDFATVRKVLSMPQVNIVKKTEVQTGGFSKESILPKRNSDKLIARKKDWDPKKYGGFDSPTVAYSVLVVAKVEKGKSKKLKSVKELLGITIMERSSFEKNPIDFLEAKGYKEVKKDLIIKLPKYSLFELENGRKRMLASAGELQKGNELALPSKYVNFLYLASHYEKLKGSPEDNEQKQLFVEQHKHYLDEIIEQISEFSKRVILADANLDKVLSAYNKHRDKPIREQAENIIHLFTLTNLGAPAAFKYFDTTIDRKRYTSTKEVLDATLIHQSITGLYETRIDLSQLGGDGGGGSEAAAKGSSGGTLNIEDEYRLHETSKEPDVPLGSTWLSDFPQAWAETGGMGLAVRQAPLIIPLKATSTPVSIKQYPMSQEARLGIKPHIQRLLDQGILVPCQSPWNTPLLPVKKPGTNDYRPVQDLREVNKRVEDIHPTVPNPYNLLSGLPPSHQWYTVLDLKDAFFCLRLHPTSQPLFAFEWRDPEMGISGQLTWTRLPQGFKNSPTLFNEALHRDLADFRIQHPDLILLQYVDDLLLAATSEQDCQRGTRALLQTLGNLGYRASAKKAQICQKQVKYLGYLLKEGQRWLTEARKETVMGQPTPKTPRQLREFLGTAGFCRLWIPGFAEMAAPLYPLTKPGTLFNWGPDQQKAYQEIKQALLTAPALGLPDLTKPFELFVDEKQGYAKGVLTQKLGPWRRPVAYLSKKLDPVAAGWPPCLRMVAAIAVLTKDAGKLTMGQPLVILAPHAVEALVKQPPDRWLSNARMTHYQAMLLDTDRVQFGPVVALNPATLLPLPEKEAPHDCLEILAETHGTRPDLTDQPIPDADYTWYTDGSSFLQEGQRRAGAAVTTETEVIWARALPAGTSAQRAELIALTQALKMAEGKKLNVYTDSRYAFATAHVHGEIYRRRGWLTSEGREIKNKNEILALLKALFLPKRLSIIHCPGHQKGNSAEARGNRMADQAAREAAMKAVLETSTLLAGKRTADGSEFEKRTADGSEFESPKKKAKVE

SEQ ID NO: 7067 - protein, 2096 aa, synthetic construct; identical to SEQ ID NO: 4522

SEQ ID NO: 7068 - protein, 2098 aa, synthetic construct
MPAAKRVKLDGGDKKYSIGLDIGTNSVGWAVITDEYKVPSKKFKVLGNTDRHSIKKNLIGALLFDSGETAEATRLKRTARRRYTRRKNRICYLQEIFSNEMAKVDDSFFHRLEESFLVEEDKKHERHPIFGNIVDEVAYHEKYPTIYHLRKKLVDSTDKADLRLIYLALAHMIKFRGHFLIEGDLNPDNSDVDKLFIQLVQTYNQLFEENPINASGVDAKAILSARLSKSRRLENLIAQLPGEKKNGLFGNLIALSLGLTPNFKSNFDLAEDAKLQLSKDTYDDDLDNLLAQIGDQYADLFLAAKNLSDAILLSDILRVNTEITKAPLSASMIKRYDEHHQDLTLLKALVRQQLPEKYKEIFFDQSKNGYAGYIDGGASQEEFYKFIKPILEKMDGTEELLVKLNREDLLRKQRTFDNGSIPHQIHLGELHAILRRQEDFYPFLKDNREKIEKILTFRIPYYVGPLARGNSRFAWMTRKSEETITPWNFEEVVDKGASAQSFIERMTNFDKNLPNEKVLPKHSLLYEYFTVYNELTKVKYVTEGMRKPAFLSGEQKKAIVDLLFKTNRKVTVKQLKEDYFKKIECFDSVEISGVEDRFNASLGTYHDLLKIIKDKDFLDNEENEDILEDIVLTLTLFEDREMIEERLKTYAHLFDDKVMKQLKRRRYTGWGRLSRKLINGIRDKQSGKTILDFLKSDGFANRNFMQLIHDDSLTFKEDIQKAQVSGQGDSLHEHIANLAGSPAIKKGILQTVKVVDELVKVMGRHKPENIVIEMARENQTTQKGQKNSRERMKRIEEGIKELGSQILKEHPVENTQLQNEKLYLYYLQNGRDMYVDQELDINRLSDYDVDHIVPQSFLKDDSIDNKVLTRSDKARGKSDNVPSEEVVKKMKNYWRQLLNAKLITQRKFDNLTKAERGGLSELDKAGFIKRQLVETRQITKHVAQILDSRMNTKYDENDKLIREVKVITLKSKLVSDFRKDFQFYKVREINNYHHAHDAYLNAVVGTALIKKYPKLESEFVYGDYKVYDVRKMIAKSEQEIGKATAKYFFYSNIMNFFKTEITLANGEIRKRPLIETNGETGEIVWDKGRDFATVRKVLSMPQVNIVKKTEVQTGGFSKESILPKRNSDKLIARKKDWDPKKYGGFDSPTVAYSVLVVAKVEKGKSKKLKSVKELLGITIMERSSFEKNPIDFLEAKGYKEVKKDLIIKLPKYSLFELENGRKRMLASAGELQKGNELALPSKYVNFLYLASHYEKLKGSPEDNEQKQLFVEQHKHYLDEIIEQISEFSKRVILADANLDKVLSAYNKHRDKPIREQAENIIHLFTLTNLGAPAAFKYFDTTIDRKRYTSTKEVLDATLIHQSITGLYETRIDLSQLGGDGGGSSGGSEAAAKGGTAPLEEEYRLFLEAPIQNVTLLEQWKREIPKVWAEINPPGLASTQAPIHVQLLSTALPVRVRQYPITLEAKRSLRETIRKFRAAGILRPVHSPWNTPLLPVRKSGTSEYRMVQDLREVNKRVETIHPTVPNPYTLLSLLPPDRIWYSVLDLKDAFFCIPLAPESQLIFAFEWADAEEGESGQLTWTRLPQGFKNSPTLFNEALNRDLQGFRLDHPSVSLLQYVDDLLIAADTQAACLSATRDLLMTLAELGYRVSGKKAQLCQEEVTYLGFKIHKGSRSLSNSRTQAILQIPVPKTKRQVREFLGTIGYCRLWIPGFAELAQPLYAATRPGNDPLVWGEKEEEAFQSLKLALTQPPALALPSLDKPFQLFVEETSGAAKGVLTQALGPWKRPVAYLSKRLDPVAAGWPRCLRAIAAAALLTREASKLTFGQDIEITSSHNLESLLRSPPDKWLTNARITQYQVLLLDPPRVRFKQTAALNPATLLPETDDTLPIHHCLDTLDSLTSTRPDLTDQPLAQAEATLFTDGSSYIRDGKRYAGAAVVTLDSVIWAEPLPIGTSAQKAELIALTKALEWSKDKSVNIYTDSRYAFATLHVHGMIYRERGWLTAGGKAIKNAPEILALLTAVWLPKRVAVMHCKGHQKDDAPTSTGNRRADEVAREVAIRPLSTQATISAGKRTADGSEFEKRTADGSEFESPKKKAKVE

SEQ ID NO: 7069 - protein, 2098 aa, synthetic construct
MPAAKRVKLDGGDKKYSIGLDIGTNSVGWAVITDEYKVPSKKFKVLGNTDRHSIKKNLIGALLFDSGETAEATRLKRTARRRYTRRKNRICYLQEIFSNEMAKVDDSFFHRLEESFLVEEDKKHERHPIFGNIVDEVAYHEKYPTIYHLRKKLVDSTDKADLRLIYLALAHMIKFRGHFLIEGDLNPDNSDVDKLFIQLVQTYNQLFEENPINASGVDAKAILSARLSKSRRLENLIAQLPGEKKNGLFGNLIALSLGLTPNFKSNFDLAEDAKLQLSKDTYDDDLDNLLAQIGDQYADLFLAAKNLSDAILLSDILRVNTEITKAPLSASMIKRYDEHHQDLTLLKALVRQQLPEKYKEIFFDQSKNGYAGYIDGGASQEEFYKFIKPILEKMDGTEELLVKLNREDLLRKQRTFDNGSIPHQIHLGELHAILRRQEDFYPFLKDNREKIEKILTFRIPYYVGPLARGNSRFAWMTRKSEETITPWNFEEVVDKGASAQSFIERMTNFDKNLPNEKVLPKHSLLYEYFTVYNELTKVKYVTEGMRKPAFLSGEQKKAIVDLLFKTNRKVTVKQLKEDYFKKIECFDSVEISGVEDRFNASLGTYHDLLKIIKDKDFLDNEENEDILEDIVLTLTLFEDREMIEERLKTYAHLFDDKVMKQLKRRRYTGWGRLSRKLINGIRDKQSGKTILDFLKSDGFANRNFMQLIHDDSLTFKEDIQKAQVSGQGDSLHEHIANLAGSPAIKKGILQTVKVVDELVKVMGRHKPENIVIEMARENQTTQKGQKNSRERMKRIEEGIKELGSQILKEHPVENTQLQNEKLYLYYLQNGRDMYVDQELDINRLSDYDVDHIVPQSFLKDDSIDNKVLTRSDKARGKSDNVPSEEVVKKMKNYWRQLLNAKLITQRKFDNLTKAERGGLSELDKAGFIKRQLVETRQITKHVAQILDSRMNTKYDENDKLIREVKVITLKSKLVSDFRKDFQFYKVREINNYHHAHDAYLNAVVGTALIKKYPKLESEFVYGDYKVYDVRKMIAKSEQEIGKATAKYFFYSNIMNFFKTEITLANGEIRKRPLIETNGETGEIVWDKGRDFATVRKVLSMPQVNIVKKTEVQTGGFSKESILPKRNSDKLIARKKDWDPKKYGGFDSPTVAYSVLVVAKVEKGKSKKLKSVKELLGITIMERSSFEKNPIDFLEAKGYKEVKKDLIIKLPKYSLFELENGRKRMLASAGELQKGNELALPSKYVNFLYLASHYEKLKGSPEDNEQKQLFVEQHKHYLDEIIEQISEFSKRVILADANLDKVLSAYNKHRDKPIREQAENIIHLFTLTNLGAPAAFKYFDTTIDRKRYTSTKEVLDATLIHQSITGLYETRIDLSQLGGDGGGSSGGSEAAAKGGTAPLEEEYRLFLEAPIQNVTLLEQWKREIPKVWAEINPPGLASTQAPIHVQLLSTALPVRVRQYPITLEAKRSLRETIRKFRAAGILRPVHSPWNTPLLPVRKSGTSEYRMVQDLREVNKRVETIHPTVPNPYTLLSLLPPDRIWYSVLDLKDAFFCIPLAPESQLIFAFEWADAEEGESGQLTWTRLPQGFKNSPTLFNEALNRDLQGFRLDHPSVSLLQYVDDLLIAADTQAACLSATRDLLMTLAELGYRVSGKKAQLCQEEVTYLGFKIHKGSRSLSNSRTQAILQIPVPKTKRQVREFLGKIGYCRLFIPGFAELAQPLYAATRPGNDPLVWGEKEEEAFQSLKLALTQPPALALPSLDKPFQLFVEETSGAAKGVLTQALGPWKRPVAYLSKRLDPVAAGWPRCLRAIAAAALLTREASKLTFGQDIEITSSHNLESLLRSPPDKWLTNARITQYQVLLLDPPRVRFKQTAALNPATLLPETDDTLPIHHCLDTLDSLTSTRPDLTDQPLAQAEATLFTDGSSYIRDGKRYAGAAVVTLDSVIWAEPLPIGTSAQKAELIALTKALEWSKDKSVNIYTDSRYAFATLHVHGMIYRERGWLTAGGKAIKNAPEILALLTAVWLPKRVAVMHCKGHQKDDAPTSTGNRRADEVAREVAIRPLSTQATISAGKRTADGSEFEKRTADGSEFESPKKKAKVE

SEQ ID NO: 7070 - protein, 2095 aa, synthetic construct
MPAAKRVKLDGGDKKYSIGLDIGTNSVGWAVITDEYKVPSKKFKVLGNTDRHSIKKNLIGALLFDSGETAEATRLKRTARRRYTRRKNRICYLQEIFSNEMAKVDDSFFHRLEESFLVEEDKKHERHPIFGNIVDEVAYHEKYPTIYHLRKKLVDSTDKADLRLIYLALAHMIKFRGHFLIEGDLNPDNSDVDKLFIQLVQTYNQLFEENPINASGVDAKAILSARLSKSRRLENLIAQLPGEKKNGLFGNLIALSLGLTPNFKSNFDLAEDAKLQLSKDTYDDDLDNLLAQIGDQYADLFLAAKNLSDAILLSDILRVNTEITKAPLSASMIKRYDEHHQDLTLLKALVRQQLPEKYKEIFFDQSKNGYAGYIDGGASQEEFYKFIKPILEKMDGTEELLVKLNREDLLRKQRTFDNGSIPHQIHLGELHAILRRQEDFYPFLKDNREKIEKILTFRIPYYVGPLARGNSRFAWMTRKSEETITPWNFEEVVDKGASAQSFIERMTNFDKNLPNEKVLPKHSLLYEYFTVYNELTKVKYVTEGMRKPAFLSGEQKKAIVDLLFKTNRKVTVKQLKEDYFKKIECFDSVEISGVEDRFNASLGTYHDLLKIIKDKDFLDNEENEDILEDIVLTLTLFEDREMIEERLKTYAHLFDDKVMKQLKRRRYTGWGRLSRKLINGIRDKQSGKTILDFLKSDGFANRNFMQLIHDDSLTFKEDIQKAQVSGQGDSLHEHIANLAGSPAIKKGILQTVKVVDELVKVMGRHKPENIVIEMARENQTTQKGQKNSRERMKRIEEGIKELGSQILKEHPVENTQLQNEKLYLYYLQNGRDMYVDQELDINRLSDYDVDHIVPQSFLKDDSIDNKVLTRSDKARGKSDNVPSEEVVKKMKNYWRQLLNAKLITQRKFDNLTKAERGGLSELDKAGFIKRQLVETRQITKHVAQILDSRMNTKYDENDKLIREVKVITLKSKLVSDFRKDFQFYKVREINNYHHAHDAYLNAVVGTALIKKYPKLESEFVYGDYKVYDVRKMIAKSEQEIGKATAKYFFYSNIMNFFKTEITLANGEIRKRPLIETNGETGEIVWDKGRDFATVRKVLSMPQVNIVKKTEVQTGGFSKESILPKRNSDKLIARKKDWDPKKYGGFDSPTVAYSVLVVAKVEKGKSKKLKSVKELLGITIMERSSFEKNPIDFLEAKGYKEVKKDLIIKLPKYSLFELENGRKRMLASAGELQKGNELALPSKYVNFLYLASHYEKLKGSPEDNEQKQLFVEQHKHYLDEIIEQISEFSKRVILADANLDKVLSAYNKHRDKPIREQAENIIHLFTLTNLGAPAAFKYFDTTIDRKRYTSTKEVLDATLIHQSITGLYETRIDLSQLGGDGGGSSGGSEAAAKGGTLQLEEEYRLFEPESTQKQEMDIWLKNFPQAWAETGGMGTAHCQAPVLIQLKATATPISIRQYPMPHEAYQGIKPHIRRMLDQGILKPCQSPWNTPLLPVKKPGTEDYRPVQDLREVNKRVEDIHPTVPNPYNLLSTLPPSHPWYTVLDLKDAFFCLRLHSESQLLFAFEWRDPEIGLSGQLTWTRLPQGFKNSPTLFNEALHSDLADFRVRYPALVLLQYVDDLLLAAATRTECLEGTKALLETLGNKGYRASAKKAQICLQEVTYLGYSLKDGQRWLTKARKEAILSIPVPKNSRQVREFLGTAGYCRLWIPGFAELAAPLYPLTRPGTLFQWGTEQQLAFEDIKKALLSSPALGLPDITKPFELFIDENSGFAKGVLVQKLGPWKRPVAYLSKKLDTVASGWPPCLRMVAAIAILVKDAGKLTLGQPLTILTSHPVEALVRQPPNKWLSNARMTHYQAMLLDAERVHFGPTVSLNPATLLPLPSGGNHHDCLQILAETHGTRPDLTDQPLPDADLTWYTDGSSFIRNGEREAGAAVTTESEVIWAAPLPPGTSAQRAELIALTQALKMAEGKKLTVYTDSRYAFATTHVHGEIYRRRGWLTSEGKEIKNKNEILALLEALFLPKRLSIIHCPGHQKGDSPQAKGNRLADDTAKKAATETHSSLTVLPAGKRTADGSEFEKRTADGSEFESPKKKAKVE

SEQ ID NO: 7071 - protein, 2094 aa, synthetic construct
MPAAKRVKLDGGDKKYSIGLDIGTNSVGWAVITDEYKVPSKKFKVLGNTDRHSIKKNLIGALLFDSGETAEATRLKRTARRRYTRRKNRICYLQEIFSNEMAKVDDSFFHRLEESFLVEEDKKHERHPIFGNIVDEVAYHEKYPTIYHLRKKLVDSTDKADLRLIYLALAHMIKFRGHFLIEGDLNPDNSDVDKLFIQLVQTYNQLFEENPINASGVDAKAILSARLSKSRRLENLIAQLPGEKKNGLFGNLIALSLGLTPNFKSNFDLAEDAKLQLSKDTYDDDLDNLLAQIGDQYADLFLAAKNLSDAILLSDILRVNTEITKAPLSASMIKRYDEHHQDLTLLKALVRQQLPEKYKEIFFDQSKNGYAGYIDGGASQEEFYKFIKPILEKMDGTEELLVKLNREDLLRKQRTFDNGSIPHQIHLGELHAILRRQEDFYPFLKDNREKIEKILTFRIPYYVGPLARGNSRFAWMTRKSEETITPWNFEEVVDKGASAQSFIERMTNFDKNLPNEKVLPKHSLLYEYFTVYNELTKVKYVTEGMRKPAFLSGEQKKAIVDLLFKTNRKVTVKQLKEDYFKKIECFDSVEISGVEDRFNASLGTYHDLLKIIKDKDFLDNEENEDILEDIVLTLTLFEDREMIEERLKTYAHLFDDKVMKQLKRRRYTGWGRLSRKLINGIRDKQSGKTILDFLKSDGFANRNFMQLIHDDSLTFKEDIQKAQVSGQGDSLHEHIANLAGSPAIKKGILQTVKVVDELVKVMGRHKPENIVIEMARENQTTQKGQKNSRERMKRIEEGIKELGSQILKEHPVENTQLQNEKLYLYYLQNGRDMYVDQELDINRLSDYDVDHIVPQSFLKDDSIDNKVLTRSDKARGKSDNVPSEEVVKKMKNYWRQLLNAKLITQRKFDNLTKAERGGLSELDKAGFIKRQLVETRQITKHVAQILDSRMNTKYDENDKLIREVKVITLKSKLVSDFRKDFQFYKVREINNYHHAHDAYLNAVVGTALIKKYPKLESEFVYGDYKVYDVRKMIAKSEQEIGKATAKYFFYSNIMNFFKTEITLANGEIRKRPLIETNGETGEIVWDKGRDFATVRKVLSMPQVNIVKKTEVQTGGFSKESILPKRNSDKLIARKKDWDPKKYGGFDSPTVAYSVLVVAKVEKGKSKKLKSVKELLGITIMERSSFEKNPIDFLEAKGYKEVKKDLIIKLPKYSLFELENGRKRMLASAGELQKGNELALPSKYVNFLYLASHYEKLKGSPEDNEQKQLFVEQHKHYLDEIIEQISEFSKRVILADANLDKVLSAYNKHRDKPIREQAENIIHLFTLTNLGAPAAFKYFDTTIDRKRYTSTKEVLDATLIHQSITGLYETRIDLSQLGGDGGGSSGGSEAAAKGGVLNLEEEYRLHEKPVPSSIDPSWLQLFPTVWAERAGMGLANQVPPVVVELRSGASPVAVRQYPMSKEAREGIRPHIQKFLDLGVLVPCRSPWNTPLLPVKKPGTNDYRPVQDLREINKRVQDIHPTVPNPYNLLSSLPPSYTWYSVLDLKDAFFCLRLHPNSQPLFAFEWKDPEKGNTGQLTWTRLPQGFKNSPTLFNEALHRDLAPFRALNPQVVLLQYVDDLLVAAPTYEDCKKGTQKLLQELSKLGYRVSAKKAQLCQREVTYLGYLLKEGKRWLTPARKATVMKIPVPTTPRQVREFLGKAGFCRLFIPGFASLAAPLYPLTKPSIPFIWTEEHQQAFDHIKKALLSAPALALPDLTKPFTLYIDERAGVARGVLTQTLGPWRRPVAYLSKKLDPVASGWPTCLKAVAAVALLLKDADKLTLGQNVTVIASHSLESIVRQPPDRWMTNARMTHYQSLLLNERVSFAPPAVLNPATLLPVESEATPVHRCSEILAEETGTRRDLEDQPLPGVPTWYTDGSSFITEGKRRAGAPIVDGKRTVWASSLPEGTSAQKAELVALTQALRLAEGKNINIYTDSRYAFATAHIHGAIYKQRGWLTSAGKDIKNKEEILALLEAIHLPRRVAIIHCPGHQRGSNPVATGNRRADEAAKQAALSTRVLAGTTKPAGKRTADGSEFEKRTADGSEFESPKKKAKVE

SEQ ID NO: 7072 - protein, 2127 aa, synthetic construct
MPAAKRVKLDGGDKKYSIGLDIGTNSVGWAVITDEYKVPSKKFKVLGNTDRHSIKKNLIGALLFDSGETAEATRLKRTARRRYTRRKNRICYLQEIFSNEMAKVDDSFFHRLEESFLVEEDKKHERHPIFGNIVDEVAYHEKYPTIYHLRKKLVDSTDKADLRLIYLALAHMIKFRGHFLIEGDLNPDNSDVDKLFIQLVQTYNQLFEENPINASGVDAKAILSARLSKSRRLENLIAQLPGEKKNGLFGNLIALSLGLTPNFKSNFDLAEDAKLQLSKDTYDDDLDNLLAQIGDQYADLFLAAKNLSDAILLSDILRVNTEITKAPLSASMIKRYDEHHQDLTLLKALVRQQLPEKYKEIFFDQSKNGYAGYIDGGASQEEFYKFIKPILEKMDGTEELLVKLNREDLLRKQRTFDNGSIPHQIHLGELHAILRRQEDFYPFLKDNREKIEKILTFRIPYYVGPLARGNSRFAWMTRKSEETITPWNFEEVVDKGASAQSFIERMTNFDKNLPNEKVLPKHSLLYEYFTVYNELTKVKYVTEGMRKPAFLSGEQKKAIVDLLFKTNRKVTVKQLKEDYFKKIECFDSVEISGVEDRFNASLGTYHDLLKIIKDKDFLDNEENEDILEDIVLTLTLFEDREMIEERLKTYAHLFDDKVMKQLKRRRYTGWGRLSRKLINGIRDKQSGKTILDFLKSDGFANRNFMQLIHDDSLTFKEDIQKAQVSGQGDSLHEHIANLAGSPAIKKGILQTVKVVDELVKVMGRHKPENIVIEMARENQTTQKGQKNSRERMKRIEEGIKELGSQILKEHPVENTQLQNEKLYLYYLQNGRDMYVDQELDINRLSDYDVDHIVPQSFLKDDSIDNKVLTRSDKARGKSDNVPSEEVVKKMKNYWRQLLNAKLITQRKFDNLTKAERGGLSELDKAGFIKRQLVETRQITKHVAQILDSRMNTKYDENDKLIREVKVITLKSKLVSDFRKDFQFYKVREINNYHHAHDAYLNAVVGTALIKKYPKLESEFVYGDYKVYDVRKMIAKSEQEIGKATAKYFFYSNIMNFFKTEITLANGEIRKRPLIETNGETGEIVWDKGRDFATVRKVLSMPQVNIVKKTEVQTGGFSKESILPKRNSDKLIARKKDWDPKKYGGFDSPTVAYSVLVVAKVEKGKSKKLKSVKELLGITIMERSSFEKNPIDFLEAKGYKEVKKDLIIKLPKYSLFELENGRKRMLASAGELQKGNELALPSKYVNFLYLASHYEKLKGSPEDNEQKQLFVEQHKHYLDEIIEQISEFSKRVILADANLDKVLSAYNKHRDKPIREQAENIIHLFTLTNLGAPAAFKYFDTTIDRKRYTSTKEVLDATLIHQSITGLYETRIDLSQLGGDGGGSSGGSEAAAKGGLLGRDLLTKLKAQIQFSTEGPQVTWEDRPAMCLVLNLEEEYRLHEKPVPPSIDPSWLQLFPMVWAEKAGMGLANQVPPVVVELKSDASPVAVRQYPMSKEAREGIRPHIQRFLDLGILVPCQSPWNTPLLPVKKPGTNDYRPVQDLREVNKRVQDIHPTVPNPYNLLSSLPPSHTWYSVLDLKDAFFCLKLHPNSQPLFAFEWRDPEKGNTGQLTWTRLPQGFKNSPTLFNEALHRDLASFRALNPQVVMLQYVDDLLVAAPTYRDCKEGTRRLLQELSKLGYRVSAKKAQLCREEVTYLGYLLKGGKRWLTPARKATVMKIPTPTTPRQVREFLGTAGFCRLWIPGFASLAAPLYPLTRPKVPFTWTEAHQEAFGRIKEALLSAPALALPDLTKPFALYVDEKEGVARGVLTQTLGPWRRPVAYLSKKLDPVASGWPTCLKAIAAVALLLKDADKLTLGQNVLVIAPHNLESIVRQPPDRWMTNARMTHYQSLLLNERVSFAPPAILNPATLLPVESDDTPIHICSEILAEETGTRPDLRDQPLPGVPAWYTDGSSFIMDGRRQAGAAIVDNKRTVWASNLPEGTSAQKAELIALTQALRLAEGKSINIYTDSRYAFATAHVHGAIYKQRGWLTSAGKDIKNKEEILALLEAIHLPKRVAIIHCPGHQRGTDPVATGNRKADEAAKQAAQSTRILTETTKNAGKRTADGSEFEKRTADGSEFESPKKKAKVE

SEQ ID NO: 7073 - protein, 2218 aa, synthetic construct
MPAAKRVKLDGGDKKYSIGLDIGTNSVGWAVITDEYKVPSKKFKVLGNTDRHSIKKNLIGALLFDSGETAEATRLKRTARRRYTRRKNRICYLQEIFSNEMAKVDDSFFHRLEESFLVEEDKKHERHPIFGNIVDEVAYHEKYPTIYHLRKKLVDSTDKADLRLIYLALAHMIKFRGHFLIEGDLNPDNSDVDKLFIQLVQTYNQLFEENPINASGVDAKAILSARLSKSRRLENLIAQLPGEKKNGLFGNLIALSLGLTPNFKSNFDLAEDAKLQLSKDTYDDDLDNLLAQIGDQYADLFLAAKNLSDAILLSDILRVNTEITKAPLSASMIKRYDEHHQDLTLLKALVRQQLPEKYKEIFFDQSKNGYAGYIDGGASQEEFYKFIKPILEKMDGTEELLVKLNREDLLRKQRTFDNGSIPHQIHLGELHAILRRQEDFYPFLKDNREKIEKILTFRIPYYVGPLARGNSRFAWMTRKSEETITPWNFEEVVDKGASAQSFIERMTNFDKNLPNEKVLPKHSLLYEYFTVYNELTKVKYVTEGMRKPAFLSGEQKKAIVDLLFKTNRKVTVKQLKEDYFKKIECFDSVEISGVEDRFNASLGTYHDLLKIIKDKDFLDNEENEDILEDIVLTLTLFEDREMIEERLKTYAHLFDDKVMKQLKRRRYTGWGRLSRKLINGIRDKQSGKTILDFLKSDGFANRNFMQLIHDDSLTFKEDIQKAQVSGQGDSLHEHIANLAGSPAIKKGILQTVKVVDELVKVMGRHKPENIVIEMARENQTTQKGQKNSRERMKRIEEGIKELGSQILKEHPVENTQLQNEKLYLYYLQNGRDMYVDQELDINRLSDYDVDHIVPQSFLKDDSIDNKVLTRSDKARGKSDNVPSEEVVKKMKNYWRQLLNAKLITQRKFDNLTKAERGGLSELDKAGFIKRQLVETRQITKHVAQILDSRMNTKYDENDKLIREVKVITLKSKLVSDFRKDFQFYKVREINNYHHAHDAYLNAVVGTALIKKYPKLESEFVYGDYKVYDVRKMIAKSEQEIGKATAKYFFYSNIMNFFKTEITLANGEIRKRPLIETNGETGEIVWDKGRDFATVRKVLSMPQVNIVKKTEVQTGGFSKESILPKRNSDKLIARKKDWDPKKYGGFDSPTVAYSVLVVAKVEKGKSKKLKSVKELLGITIMERSSFEKNPIDFLEAKGYKEVKKDLIIKLPKYSLFELENGRKRMLASAGELQKGNELALPSKYVNFLYLASHYEKLKGSPEDNEQKQLFVEQHKHYLDEIIEQISEFSKRVILADANLDKVLSAYNKHRDKPIREQAENIIHLFTLTNLGAPAAFKYFDTTIDRKRYTSTKEVLDATLIHQSITGLYETRIDLSQLGGDGGGSSGGSEAAAKGGTLGDQGSRGSDPLPEPRVTLTVEGIPTEFLVNTGAEHSVLTKPMGKMGSKRTVVAGATGSKVYPWTTKRLLKIGQKQVTHSFLVIPECPAPLLGRDLLTKLKAQIQFSTEGPQVTWEDRPAMCLVLNLEEEYRLHEKPVPPSIDPSWLQLFPMVWAEKAGMGLANQVPPVVVELKSDASPVAVRQYPMSKEAREGIRPHIQRFLDLGILVPCQSPWNTPLLPVKKPGTNDYRPVQDLREVNKRVQDIHPTVPNPYNLLSSLPPSHTWYSVLDLKDAFFCLKLHPNSQPLFAFEWRDPEKGNTGQLTWTRLPQGFKNSPTLFNEALHRDLASFRALNPQVVMLQYVDDLLVAAPTYRDCKEGTRRLLQELSKLGYRVSAKKAQLCREEVTYLGYLLKGGKRWLTPARKATVMKIPTPTTPRQVREFLGTAGFCRLWIPGFASLAAPLYPLTRPKVPFTWTEAHQEAFGRIKEALLSAPALALPDLTKPFALYVDEKEGVARGVLTQTLGPWRRPVAYLSKKLDPVASGWPTCLKAIAAVALLLKDADKLTLGQNVLVIAPHNLESIVRQPPDRWMTNARMTHYQSLLLNERVSFAPPAILNPATLLPVESDDTPIHICSEILAEETGTRPDLRDQPLPGVPAWYTDGSSFIMDGRRQAGAAIVDNKRTVWASNLPEGTSAQKAELIALTQALRLAEGKSINIYTDSRYAFATAHVHGAIYKQRGWLTSAGKDIKNKEEILALLEAIHLPKRVAIIHCPGHQRGTDPVATGNRKADEAAKQAAQSTRILTETTKNAGKRTADGSEFEKRTADGSEFESPKKKAKVE

SEQ ID NO: 7074 - protein, 2090 aa, synthetic construct
MPAAKRVKLDGGDKKYSIGLDIGTNSVGWAVITDEYKVPSKKFKVLGNTDRHSIKKNLIGALLFDSGETAEATRLKRTARRRYTRRKNRICYLQEIFSNEMAKVDDSFFHRLEESFLVEEDKKHERHPIFGNIVDEVAYHEKYPTIYHLRKKLVDSTDKADLRLIYLALAHMIKFRGHFLIEGDLNPDNSDVDKLFIQLVQTYNQLFEENPINASGVDAKAILSARLSKSRRLENLIAQLPGEKKNGLFGNLIALSLGLTPNFKSNFDLAEDAKLQLSKDTYDDDLDNLLAQIGDQYADLFLAAKNLSDAILLSDILRVNTEITKAPLSASMIKRYDEHHQDLTLLKALVRQQLPEKYKEIFFDQSKNGYAGYIDGGASQEEFYKFIKPILEKMDGTEELLVKLNREDLLRKQRTFDNGSIPHQIHLGELHAILRRQEDFYPFLKDNREKIEKILTFRIPYYVGPLARGNSRFAWMTRKSEETITPWNFEEVVDKGASAQSFIERMTNFDKNLPNEKVLPKHSLLYEYFTVYNELTKVKYVTEGMRKPAFLSGEQKKAIVDLLFKTNRKVTVKQLKEDYFKKIECFDSVEISGVEDRFNASLGTYHDLLKIIKDKDFLDNEENEDILEDIVLTLTLFEDREMIEERLKTYAHLFDDKVMKQLKRRRYTGWGRLSRKLINGIRDKQSGKTILDFLKSDGFANRNFMQLIHDDSLTFKEDIQKAQVSGQGDSLHEHIANLAGSPAIKKGILQTVKVVDELVKVMGRHKPENIVIEMARENQTTQKGQKNSRERMKRIEEGIKELGSQILKEHPVENTQLQNEKLYLYYLQNGRDMYVDQELDINRLSDYDVDHIVPQSFLKDDSIDNKVLTRSDKARGKSDNVPSEEVVKKMKNYWRQLLNAKLITQRKFDNLTKAERGGLSELDKAGFIKRQLVETRQITKHVAQILDSRMNTKYDENDKLIREVKVITLKSKLVSDFRKDFQFYKVREINNYHHAHDAYLNAVVGTALIKKYPKLESEFVYGDYKVYDVRKMIAKSEQEIGKATAKYFFYSNIMNFFKTEITLANGEIRKRPLIETNGETGEIVWDKGRDFATVRKVLSMPQVNIVKKTEVQTGGFSKESILPKRNSDKLIARKKDWDPKKYGGFDSPTVAYSVLVVAKVEKGKSKKLKSVKELLGITIMERSSFEKNPIDFLEAKGYKEVKKDLIIKLPKYSLFELENGRKRMLASAGELQKGNELALPSKYVNFLYLASHYEKLKGSPEDNEQKQLFVEQHKHYLDEIIEQISEFSKRVILADANLDKVLSAYNKHRDKPIREQAENIIHLFTLTNLGAPAAFKYFDTTIDRKRYTSTKEVLDATLIHQSITGLYETRIDLSQLGGDGGGSSGGSEAAAKGGTLQLDDEYRLYSPLVKPDQNIQFWLEQFPQAWAETAGMGLAKQVPPQVIQLKASATPVSVRQYPLSKEAQEGIRPHVQRLIQQGILVPVQSPWNTPLLPVRKPGTNDYRPVQDLREVNKRVQDIHPTVPNPYNLLCALPPQRSWYTVLDLKDAFFCLRLHPTSQPLFAFEWRDPGTGRTGQLTWTRLPQGFKNSPTIFDEALHRDLANFRIQHPQVTLLQYVDDLLLAGATKQDCLEGTKALLLELSDLGYRASAKKAQICRREVTYLGYSLRDGQRWLTEARKKTVVQIPAPTTAKQVREFLGTAGFCRLWIPGFATLAAPLYPLTKEKGEFSWAPEHQKAFDAIKKALLSAPALALPDVTKPFTLYVDERKGVARGVLTQTLGPWRRPVAYLSKKLDPVASGWPVCLKAIAAVAILVKDADKLTLGQNITVIAPHALENIVRQPPDRWMTNARMTHYQSLLLTERVTFAPPAALNPATLLPEETDEPVTHDCHQLLIEETGVRKDLTDIPLTGEVLTWFTDGSSYVVEGKRMAGAAVVDGTRTIWASSLPEGTSAQKAELMALTQALRLAEGKSINIYTDSRYAFATAHVHGAIYKQRGLLTSAGREIKNKEEILSLLEALHLPKRLAIIHCPGHQKAKDPISRGNQMADRVAKQAAQGVNLLAGKRTADGSEFEKRTADGSEFESPKKKAKVE

SEQ ID NO: 7075 - protein, 2090 aa, synthetic construct; identical to SEQ ID NO: 7074

SEQ ID NO: 7076 - protein, 2176 aa, synthetic construct
MPAAKRVKLDGGDKKYSIGLDIGTNSVGWAVITDEYKVPSKKFKVLGNTDRHSIKKNLIGALLFDSGETAEATRLKRTARRRYTRRKNRICYLQEIFSNEMAKVDDSFFHRLEESFLVEEDKKHERHPIFGNIVDEVAYHEKYPTIYHLRKKLVDSTDKADLRLIYLALAHMIKFRGHFLIEGDLNPDNSDVDKLFIQLVQTYNQLFEENPINASGVDAKAILSARLSKSRRLENLIAQLPGEKKNGLFGNLIALSLGLTPNFKSNFDLAEDAKLQLSKDTYDDDLDNLLAQIGDQYADLFLAAKNLSDAILLSDILRVNTEITKAPLSASMIKRYDEHHQDLTLLKALVRQQLPEKYKEIFFDQSKNGYAGYIDGGASQEEFYKFIKPILEKMDGTEELLVKLNREDLLRKQRTFDNGSIPHQIHLGELHAILRRQEDFYPFLKDNREKIEKILTFRIPYYVGPLARGNSRFAWMTRKSEETITPWNFEEVVDKGASAQSFIERMTNFDKNLPNEKVLPKHSLLYEYFTVYNELTKVKYVTEGMRKPAFLSGEQKKAIVDLLFKTNRKVTVKQLKEDYFKKIECFDSVEISGVEDRFNASLGTYHDLLKIIKDKDFLDNEENEDILEDIVLTLTLFEDREMIEERLKTYAHLFDDKVMKQLKRRRYTGWGRLSRKLINGIRDKQSGKTILDFLKSDGFANRNFMQLIHDDSLTFKEDIQKAQVSGQGDSLHEHIANLAGSPAIKKGILQTVKVVDELVKVMGRHKPENIVIEMARENQTTQKGQKNSRERMKRIEEGIKELGSQILKEHPVENTQLQNEKLYLYYLQNGRDMYVDQELDINRLSDYDVDHIVPQSFLKDDSIDNKVLTRSDKARGKSDNVPSEEVVKKMKNYWRQLLNAKLITQRKFDNLTKAERGGLSELDKAGFIKRQLVETRQITKHVAQILDSRMNTKYDENDKLIREVKVITLKSKLVSDFRKDFQFYKVREINNYHHAHDAYLNAVVGTALIKKYPKLESEFVYGDYKVYDVRKMIAKSEQEIGKATAKYFFYSNIMNFFKTEITLANGEIRKRPLIETNGETGEIVWDKGRDFATVRKVLSMPQVNIVKKTEVQTGGFSKESILPKRNSDKLIARKKDWDPKKYGGFDSPTVAYSVLVVAKVEKGKSKKLKSVKELLGITIMERSSFEKNPIDFLEAKGYKEVKKDLIIKLPKYSLFELENGRKRMLASAGELQKGNELALPSKYVNFLYLASHYEKLKGSPEDNEQKQLFVEQHKHYLDEIIEQISEFSKRVILADANLDKVLSAYNKHRDKPIREQAENIIHLFTLTNLGAPAAFKYFDTTIDRKRYTSTKEVLDATLIHQSITGLYETRIDLSQLGGDGGGSSGGSEAAAKGGMDPLQLLQPLEAEIKGTKLKAHWNSGATITCVPEAFLEDERPIQTMLIKTIHGEKQQDVYYLTFKVQGRKVEAEVLASPYDYILLNPSDVPWLMKKPLQLTVLVPLHEYQERLLQQTALPKEQKELLQKLFLKYDALWQHWENQVGHRRIKPHNIATGTLAPRPQKQYPINPKAKPSIQIVIDDLLKQGVLIQQNSTMNTPVYPVPKPDGKWRMVLDYREVNKTIPLIAAQNQHSAGILSSIYRGKYKTTLDLTNGFWAHPITPESYWLTAFTWQGKQYCWTRLPQGFLNSPALFNADVVDLLKEIPNVQAYVDDIYISHDDPQEHLEQLEKIFSILLNAGYVVSLKKSEIAQREVEFLGFNITKEGRGLTDTFKQKLLNITPPKDLKQLQSILGLLNFARNFIPNYSELVKPLYTIVAPANGKFISWTEDNSNQLQHIISVLNQADNLEERNPETRLIIKVNSSPSAGYIRYYNEGSKRPIMYVNYIFSKAEAKFTQTEKLLTTMHKGLIKAMDLAMGQEILVYSPIVSMTKIQRTPLPERKALPVRWITWMTYLEDPRIQFHYDKSLPELQQIPNVTEDVIAKTKHPSEFAMVFYTDGSAIKHPDVNKSHSAGMGIAQVQFIPEYKIVHQWSIPLGDHTAQLAEIAAVEFACKKALKISGPVLIVTDSFYVAESANKELPYWKSNGFLNNKKKPLRHVSKWKSIAECLQLKPDIIIMHEKGHQQPMTTLHTEGNNLADKLATQGSYVVHAGKRTADGSEFEKRTADGSEFESPKKKAKVE

SEQ ID NO: 7077 - protein, 2176 aa, synthetic construct
MPAAKRVKLDGGDKKYSIGLDIGTNSVGWAVITDEYKVPSKKFKVLGNTDRHSIKKNLIGALLFDSGETAEATRLKRTARRRYTRRKNRICYLQEIFSNEMAKVDDSFFHRLEESFLVEEDKKHERHPIFGNIVDEVAYHEKYPTIYHLRKKLVDSTDKADLRLIYLALAHMIKFRGHFLIEGDLNPDNSDVDKLFIQLVQTYNQLFEENPINASGVDAKAILSARLSKSRRLENLIAQLPGEKKNGLFGNLIALSLGLTPNFKSNFDLAEDAKLQLSKDTYDDDLDNLLAQIGDQYADLFLAAKNLSDAILLSDILRVNTEITKAPLSASMIKRYDEHHQDLTLLKALVRQQLPEKYKEIFFDQSKNGYAGYIDGGASQEEFYKFIKPILEKMDGTEELLVKLNREDLLRKQRTFDNGSIPHQIHLGELHAILRRQEDFYPFLKDNREKIEKILTFRIPYYVGPLARGNSRFAWMTRKSEETITPWNFEEVVDKGASAQSFIERMTNFDKNLPNEKVLPKHSLLYEYFTVYNELTKVKYVTEGMRKPAFLSGEQKKAIVDLLFKTNRKVTVKQLKEDYFKKIECFDSVEISGVEDRFNASLGTYHDLLKIIKDKDFLDNEENEDILEDIVLTLTLFEDREMIEERLKTYAHLFDDKVMKQLKRRRYTGWGRLSRKLINGIRDKQSGKTILDFLKSDGFANRNFMQLIHDDSLTFKEDIQKAQVSGQGDSLHEHIANLAGSPAIKKGILQTVKVVDELVKVMGRHKPENIVIEMARENQTTQKGQKNSRERMKRIEEGIKELGSQILKEHPVENTQLQNEKLYLYYLQNGRDMYVDQELDINRLSDYDVDHIVPQSFLKDDSIDNKVLTRSDKARGKSDNVPSEEVVKKMKNYWRQLLNAKLITQRKFDNLTKAERGGLSELDKAGFIKRQLVETRQITKHVAQILDSRMNTKYDENDKLIREVKVITLKSKLVSDFRKDFQFYKVREINNYHHAHDAYLNAVVGTALIKKYPKLESEFVYGDYKVYDVRKMIAKSEQEIGKATAKYFFYSNIMNFFKTEITLANGEIRKRPLIETNGETGEIVWDKGRDFATVRKVLSMPQVNIVKKTEVQTGGFSKESILPKRNSDKLIARKKDWDPKKYGGFDSPTVAYSVLVVAKVEKGKSKKLKSVKELLGITIMERSSFEKNPIDFLEAKGYKEVKKDLIIKLPKYSLFELENGRKRMLASAGELQKGNELALPSKYVNFLYLASHYEKLKGSPEDNEQKQLFVEQHKHYLDEIIEQISEFSKRVILADANLDKVLSAYNKHRDKPIREQAENIIHLFTLTNLGAPAAFKYFDTTIDRKRYTSTKEVLDATLIHQSITGLYETRIDLSQLGGDGGGSSGGSEAAAKGGMDPLQLLQPLEAEIKGTKLKAHWNSGATITCVPQAFLEEEVPIKNIWIKTIHGEKEQPVYYLTFKIQGRKVEAEVISSPYDYILVSPSDIPWLMKKPLQLTTLVPLQEYEERLLKQTMLTGSYKEKLQSLFLKYDALWQHWENQVGHRRIKPHHIATGTVNPRPQKQYPINPKAKASIQTVINDLLKQGVLIQQNSIMNTPVYPVPKPDGKWRMVLDYREVNKTIPLIAAQNQHSAGILSSIFRGKYKTTLDLSNGFWAHSITPESYWLTAFTWLGQQYCWTRLPQGFLNSPALFNADVVDLLKEVPNVQVYVDDIYISHDDPREHLEQLEKVFSLLLNAGYVVSLKKSEIAQHEVEFLGFNITKEGRGLTETFKQKLLNITPPRDLKQLQSILGLLNFARNFIPNFSELVKPLYNIIATAPGKYITWTTDNSQQLQNIISMLNSAENLEERNPEVRLIMKVNTSPSAGYIRFYNEFAKRPIMYLNYVYTKAEVKFTNTEKLLTTIHKGLIKALDLGMGQEILVYSPIVSMTKIQKTPLPERKALPIRWITWMSYLEDPRIQFHYDKTLPELQQVPTVTDDIIAKIKHPSEFSMVFYTDGSAIKHPNVNKSHNAGMGIAQVQFKPEFTVINTWSIPLGDHTAQLAEVAAVEFACKKALKIDGPVLIVTDSFYVAESVNKELPYWQSNGFFNNKKKPLKHVSKWKSIADCIQLKPDIIIIHEKGHQPTASTFHTEGNNLADKLATQGSYVVNAGKRTADGSEFEKRTADGSEFESPKKKAKVE

SEQ ID NO: 7078 - protein, 2098 aa, synthetic construct
MPAAKRVKLDGGDKKYSIGLDIGTNSVGWAVITDEYKVPSKKFKVLGNTDRHSIKKNLIGALLFDSGETAEATRLKRTARRRYTRRKNRICYLQEIFSNEMAKVDDSFFHRLEESFLVEEDKKHERHPIFGNIVDEVAYHEKYPTIYHLRKKLVDSTDKADLRLIYLALAHMIKFRGHFLIEGDLNPDNSDVDKLFIQLVQTYNQLFEENPINASGVDAKAILSARLSKSRRLENLIAQLPGEKKNGLFGNLIALSLGLTPNFKSNFDLAEDAKLQLSKDTYDDDLDNLLAQIGDQYADLFLAAKNLSDAILLSDILRVNTEITKAPLSASMIKRYDEHHQDLTLLKALVRQQLPEKYKEIFFDQSKNGYAGYIDGGASQEEFYKFIKPILEKMDGTEELLVKLNREDLLRKQRTFDNGSIPHQIHLGELHAILRRQEDFYPFLKDNREKIEKILTFRIPYYVGPLARGNSRFAWMTRKSEETITPWNFEEVVDKGASAQSFIERMTNFDKNLPNEKVLPKHSLLYEYFTVYNELTKVKYVTEGMRKPAFLSGEQKKAIVDLLFKTNRKVTVKQLKEDYFKKIECFDSVEISGVEDRFNASLGTYHDLLKIIKDKDFLDNEENEDILEDIVLTLTLFEDREMIEERLKTYAHLFDDKVMKQLKRRRYTGWGRLSRKLINGIRDKQSGKTILDFLKSDGFANRNFMQLIHDDSLTFKEDIQKAQVSGQGDSLHEHIANLAGSPAIKKGILQTVKVVDELVKVMGRHKPENIVIEMARENQTTQKGQKNSRERMKRIEEGIKELGSQILKEHPVENTQLQNEKLYLYYLQNGRDMYVDQELDINRLSDYDVDHIVPQSFLKDDSIDNKVLTRSDKARGKSDNVPSEEVVKKMKNYWRQLLNAKLITQRKFDNLTKAERGGLSELDKAGFIKRQLVETRQITKHVAQILDSRMNTKYDENDKLIREVKVITLKSKLVSDFRKDFQFYKVREINNYHHAHDAYLNAVVGTALIKKYPKLESEFVYGDYKVYDVRKMIAKSEQEIGKATAKYFFYSNIMNFFKTEITLANGEIRKRPLIETNGETGEIVWDKGRDFATVRKVLSMPQVNIVKKTEVQTGGFSKESILPKRNSDKLIARKKDWDPKKYGGFDSPTVAYSVLVVAKVEKGKSKKLKSVKELLGITIMERSSFEKNPIDFLEAKGYKEVKKDLIIKLPKYSLFELENGRKRMLASAGELQKGNELALPSKYVNFLYLASHYEKLKGSPEDNEQKQLFVEQHKHYLDEIIEQISEFSKRVILADANLDKVLSAYNKHRDKPIREQAENIIHLFTLTNLGAPAAFKYFDTTIDRKRYTSTKEVLDATLIHQSITGLYETRIDLSQLGGDGGGSSEAAAKGGSGGTAPLEEEYRLFLEAPIQNVTLLEQWKREIPKVWAEINPPGLASTQAPIHVQLLSTALPVRVRQYPITLEAKRSLRETIRKFRAAGILRPVHSPWNTPLLPVRKSGTSEYRMVQDLREVNKRVETIHPTVPNPYTLLSLLPPDRIWYSVLDLKDAFFCIPLAPESQLIFAFEWADAEEGESGQLTWTRLPQGFKNSPTLFDEALNRDLQGFRLDHPSVSLLQYVDDLLIAADTQAACLSATRDLLMTLAELGYRVSGKKAQLCQEEVTYLGFKIHKGSRSLSNSRTQAILQIPVPKTKRQVREFLGTIGYCRLWIPGFAELAQPLYAATRGGNDPLVWGEKEEEAFQSLKLALTQPPALALPSLDKPFQLFVEETSGAAKGVLTQALGPWKRPVAYLSKRLDPVAAGWPRCLRAIAAAALLTREASKLTFGQDIEITSSHNLESLLRSPPDKWLTNARITQYQVLLLDPPRVRFKQTAALNPATLLPETDDTLPIHHCLDTLDSLTSTRPDLTDQPLAQAEATLFTDGSSYIRDGKRYAGAAVVTLDSVIWAEPLPIGTSAQKAELIALTKALEWSKDKSVNIYTDSRYAFATLHVHGMIYRERGLLTAGGKAIKNAPEILALLTAVWLPKRVAVMHCKGHQKDDAPTSTGNRRADEVAREVAIRPLSTQATISAGKRTADGSEFEKRTADGSEFESPKKKAKVE

SEQ ID NO: 7079 - protein, 2098 aa, synthetic construct
MPAAKRVKLDGGDKKYSIGLDIGTNSVGWAVITDEYKVPSKKFKVLGNTDRHSIKKNLIGALLFDSGETAEATRLKRTARRRYTRRKNRICYLQEIFSNEMAKVDDSFFHRLEESFLVEEDKKHERHPIFGNIVDEVAYHEKYPTIYHLRKKLVDSTDKADLRLIYLALAHMIKFRGHFLIEGDLNPDNSDVDKLFIQLVQTYNQLFEENPINASGVDAKAILSARLSKSRRLENLIAQLPGEKKNGLFGNLIALSLGLTPNFKSNFDLAEDAKLQLSKDTYDDDLDNLLAQIGDQYADLFLAAKNLSDAILLSDILRVNTEITKAPLSASMIKRYDEHHQDLTLLKALVRQQLPEKYKEIFFDQSKNGYAGYIDGGASQEEFYKFIKPILEKMDGTEELLVKLNREDLLRKQRTFDNGSIPHQIHLGELHAILRRQEDFYPFLKDNREKIEKILTFRIPYYVGPLARGNSRFAWMTRKSEETITPWNFEEVVDKGASAQSFIERMTNFDKNLPNEKVLPKHSLLYEYFTVYNELTKVKYVTEGMRKPAFLSGEQKKAIVDLLFKTNRKVTVKQLKEDYFKKIECFDSVEISGVEDRFNASLGTYHDLLKIIKDKDFLDNEENEDILEDIVLTLTLFEDREMIEERLKTYAHLFDDKVMKQLKRRRYTGWGRLSRKLINGIRDKQSGKTILDFLKSDGFANRNFMQLIHDDSLTFKEDIQKAQVSGQGDSLHEHIANLAGSPAIKKGILQTVKVVDELVKVMGRHKPENIVIEMARENQTTQKGQKNSRERMKRIEEGIKELGSQILKEHPVENTQLQNEKLYLYYLQNGRDMYVDQELDINRLSDYDVDHIVPQSFLKDDSIDNKVLTRSDKARGKSDNVPSEEVVKKMKNYWRQLLNAKLITQRKFDNLTKAERGGLSELDKAGFIKRQLVETRQITKHVAQILDSRMNTKYDENDKLIREVKVITLKSKLVSDFRKDFQFYKVREINNYHHAHDAYLNAVVGTALIKKYPKLESEFVYGDYKVYDVRKMIAKSEQEIGKATAKYFFYSNIMNFFKTEITLANGEIRKRPLIETNGETGEIVWDKGRDFATVRKVLSMPQVNIVKKTEVQTGGFSKESILPKRNSDKLIARKKDWDPKKYGGFDSPTVAYSVLVVAKVEKGKSKKLKSVKELLGITIMERSSFEKNPIDFLEAKGYKEVKKDLIIKLPKYSLFELENGRKRMLASAGELQKGNELALPSKYVNFLYLASHYEKLKGSPEDNEQKQLFVEQHKHYLDEIIEQISEFSKRVILADANLDKVLSAYNKHRDKPIREQAENIIHLFTLTNLGAPAAFKYFDTTIDRKRYTSTKEVLDATLIHQSITGLYETRIDLSQLGGDGGGSSEAAAKGGSGGTAPLEEEYRLFLEAPIQNVTLLEQWKREIPKVWAEINPPGLASTQAPIHVQLLSTALPVRVRQYPITLEAKRSLRETIRKFRAAGILRPVHSPWNTPLLPVRKSGTSEYRMVQDLREVNKRVETIHPTVPNPYTLLSLLPPDRIWYSVLDLKDAFFCIPLAPESQLIFAFEWADAEEGESGQLTWTRLPQGFKNSPTLFNEALNRDLQGFRLDHPSVSLLQYVDDLLIAADTQAACLSATRDLLMTLAELGYRVSGKKAQLCQEEVTYLGFKIHKGSRSLSNSRTQAILQIPVPKTKRQVREFLGTIGYCRLWIPGFAELAQPLYAATRPGNDPLVWGEKEEEAFQSLKLALTQPPALALPSLDKPFQLFVEETSGAAKGVLTQALGPWKRPVAYLSKRLDPVAAGWPRCLRAIAAAALLTREASKLTFGQDIEITSSHNLESLLRSPPDKWLTNARITQYQVLLLDPPRVRFKQTAALNPATLLPETDDTLPIHHCLDTLDSLTSTRPDLTDQPLAQAEATLFTDGSSYIRDGKRYAGAAVVTLDSVIWAEPLPIGTSAQKAELIALTKALEWSKDKSVNIYTDSRYAFATLHVHGMIYRERGWLTAGGKAIKNAPEILALLTAVWLPKRVAVMHCKGHQKDDAPTSTGNRRADEVAREVAIRPLSTQATISAGKRTADGSEFEKRTADGSEFESPKKKAKVE

SEQ ID NO: 7080 - protein, 2098 aa, synthetic construct
MPAAKRVKLDGGDKKYSIGLDIGTNSVGWAVITDEYKVPSKKFKVLGNTDRHSIKKNLIGALLFDSGETAEATRLKRTARRRYTRRKNRICYLQEIFSNEMAKVDDSFFHRLEESFLVEEDKKHERHPIFGNIVDEVAYHEKYPTIYHLRKKLVDSTDKADLRLIYLALAHMIKFRGHFLIEGDLNPDNSDVDKLFIQLVQTYNQLFEENPINASGVDAKAILSARLSKSRRLENLIAQLPGEKKNGLFGNLIALSLGLTPNFKSNFDLAEDAKLQLSKDTYDDDLDNLLAQIGDQYADLFLAAKNLSDAILLSDILRVNTEITKAPLSASMIKRYDEHHQDLTLLKALVRQQLPEKYKEIFFDQSKNGYAGYIDGGASQEEFYKFIKPILEKMDGTEELLVKLNREDLLRKQRTFDNGSIPHQIHLGELHAILRRQEDFYPFLKDNREKIEKILTFRIPYYVGPLARGNSRFAWMTRKSEETITPWNFEEVVDKGASAQSFIERMTNFDKNLPNEKVLPKHSLLYEYFTVYNELTKVKYVTEGMRKPAFLSGEQKKAIVDLLFKTNRKVTVKQLKEDYFKKIECFDSVEISGVEDRFNASLGTYHDLLKIIKDKDFLDNEENEDILEDIVLTLTLFEDREMIEERLKTYAHLFDDKVMKQLKRRRYTGWGRLSRKLINGIRDKQSGKTILDFLKSDGFANRNFMQLIHDDSLTFKEDIQKAQVSGQGDSLHEHIANLAGSPAIKKGILQTVKVVDELVKVMGRHKPENIVIEMARENQTTQKGQKNSRERMKRIEEGIKELGSQILKEHPVENTQLQNEKLYLYYLQNGRDMYVDQELDINRLSDYDVDHIVPQSFLKDDSIDNKVLTRSDKARGKSDNVPSEEVVKKMKNYWRQLLNAKLITQRKFDNLTKAERGGLSELDKAGFIKRQLVETRQITKHVAQILDSRMNTKYDENDKLIREVKVITLKSKLVSDFRKDFQFYKVREINNYHHAHDAYLNAVVGTALIKKYPKLESEFVYGDYKVYDVRKMIAKSEQEIGKATAKYFFYSNIMNFFKTEITLANGEIRKRPLIETNGETGEIVWDKGRDFATVRKVLSMPQVNIVKKTEVQTGGFSKESILPKRNSDKLIARKKDWDPKKYGGFDSPTVAYSVLVVAKVEKGKSKKLKSVKELLGITIMERSSFEKNPIDFLEAKGYKEVKKDLIIKLPKYSLFELENGRKRMLASAGELQKGNELALPSKYVNFLYLASHYEKLKGSPEDNEQKQLFVEQHKHYLDEIIEQISEFSKRVILADANLDKVLSAYNKHRDKPIREQAENIIHLFTLTNLGAPAAFKYFDTTIDRKRYTSTKEVLDATLIHQSITGLYETRIDLSQLGGDGGGSSEAAAKGGSGGTAPLEEEYRLFLEAPIQNVTLLEQWKREIPKVWAEINPPGLASTQAPIHVQLLSTALPVRVRQYPITLEAKRSLRETIRKFRAAGILRPVHSPWNTPLLPVRKSGTSEYRMVQDLREVNKRVETIHPTVPNPYTLLSLLPPDRIWYSVLDLKDAFFCIPLAPESQLIFAFEWADAEEGESGQLTWTRLPQGFKNSPTLFNEALNRDLQGFRLDHPSVSLLQYVDDLLIAADTQAACLSATRDLLMTLAELGYRVSGKKAQLCQEEVTYLGFKIHKGSRSLSNSRTQAILQIPVPKTKRQVREFLGKIGYCRLFIPGFAELAQPLYAATRPGNDPLVWGEKEEEAFQSLKLALTQPPALALPSLDKPFQLFVEETSGAAKGVLTQALGPWKRPVAYLSKRLDPVAAGWPRCLRAIAAAALLTREASKLTFGQDIEITSSHNLESLLRSPPDKWLTNARITQYQVLLLDPPRVRFKQTAALNPATLLPETDDTLPIHHCLDTLDSLTSTRPDLTDQPLAQAEATLFTDGSSYIRDGKRYAGAAVVTLDSVIWAEPLPIGTSAQKAELIALTKALEWSKDKSVNIYTDSRYAFATLHVHGMIYRERGWLTAGGKAIKNAPEILALLTAVWLPKRVAVMHCKGHQKDDAPTSTGNRRADEVAREVAIRPLSTQATISAGKRTADGSEFEKRTADGSEFESPKKKAKVE

SEQ ID NO: 7081 - protein, 2102 aa, synthetic construct
MPAAKRVKLDGGDKKYSIGLDIGTNSVGWAVITDEYKVPSKKFKVLGNTDRHSIKKNLIGALLFDSGETAEATRLKRTARRRYTRRKNRICYLQEIFSNEMAKVDDSFFHRLEESFLVEEDKKHERHPIFGNIVDEVAYHEKYPTIYHLRKKLVDSTDKADLRLIYLALAHMIKFRGHFLIEGDLNPDNSDVDKLFIQLVQTYNQLFEENPINASGVDAKAILSARLSKSRRLENLIAQLPGEKKNGLFGNLIALSLGLTPNFKSNFDLAEDAKLQLSKDTYDDDLDNLLAQIGDQYADLFLAAKNLSDAILLSDILRVNTEITKAPLSASMIKRYDEHHQDLTLLKALVRQQLPEKYKEIFFDQSKNGYAGYIDGGASQEEFYKFIKPILEKMDGTEELLVKLNREDLLRKQRTFDNGSIPHQIHLGELHAILRRQEDFYPFLKDNREKIEKILTFRIPYYVGPLARGNSRFAWMTRKSEETITPWNFEEVVDKGASAQSFIERMTNFDKNLPNEKVLPKHSLLYEYFTVYNELTKVKYVTEGMRKPAFLSGEQKKAIVDLLFKTNRKVTVKQLKEDYFKKIECFDSVEISGVEDRFNASLGTYHDLLKIIKDKDFLDNEENEDILEDIVLTLTLFEDREMIEERLKTYAHLFDDKVMKQLKRRRYTGWGRLSRKLINGIRDKQSGKTILDFLKSDGFANRNFMQLIHDDSLTFKEDIQKAQVSGQGDSLHEHIANLAGSPAIKKGILQTVKVVDELVKVMGRHKPENIVIEMARENQTTQKGQKNSRERMKRIEEGIKELGSQILKEHPVENTQLQNEKLYLYYLQNGRDMYVDQELDINRLSDYDVDHIVPQSFLKDDSIDNKVLTRSDKARGKSDNVPSEEVVKKMKNYWRQLLNAKLITQRKFDNLTKAERGGLSELDKAGFIKRQLVETRQITKHVAQILDSRMNTKYDENDKLIREVKVITLKSKLVSDFRKDFQFYKVREINNYHHAHDAYLNAVVGTALIKKYPKLESEFVYGDYKVYDVRKMIAKSEQEIGKATAKYFFYSNIMNFFKTEITLANGEIRKRPLIETNGETGEIVWDKGRDFATVRKVLSMPQVNIVKKTEVQTGGFSKESILPKRNSDKLIARKKDWDPKKYGGFDSPTVAYSVLVVAKVEKGKSKKLKSVKELLGITIMERSSFEKNPIDFLEAKGYKEVKKDLIIKLPKYSLFELENGRKRMLASAGELQKGNELALPSKYVNFLYLASHYEKLKGSPEDNEQKQLFVEQHKHYLDEIIEQISEFSKRVILADANLDKVLSAYNKHRDKPIREQAENIIHLFTLTNLGAPAAFKYFDTTIDRKRYTSTKEVLDATLIHQSITGLYETRIDLSQLGGDGGGSSEAAAKGGSGGTVSLQDEHRLFDIPVTTSLPDVWLQDFPQAWAETGGLGRAKCQAPIIIDLKPTAVPVSIKQYPMSLEAHMGIRQHIIKFLELGVLRPCRSPWNTPLLPVKKPGTQDYRPVQDLREINKRTVDIHPTVPNPYNLLSTLKPDYSWYTVLDLKDAFFCLPLAPQSQELFAFEWKDPERGISGQLTWTRLPQGFKNSPTLFNEALHRDLTDFRTQHPEVTLLQYVDDLLLAAPTKKACTQGTRHLLQELGEKGYRASAKKAQICQTKVTYLGYILSEGKRWLTPGRIETVARIPPPRNPREVREFLGTAGFCRLWIPGFAELAAPLYALTKPSTPFTWQTEHQLAFEALKKALLSAPALGLPDTSKPFTLFLDERQGIAKGVLTQKLGPWKRPVAYLSKKLDPVAAGWPPCLRIMAATAMLVKDSAKLTLGQPLTVITPHTLEAIVRQPPDRWITNARLTHYQALLLDTDRVQFGPPVTLNPATLLPVPENQPSPHDCRQVLAETHGTREDLKDQELPDADHTWYTDGSSYLDSGTRRAGAAVVDGHNTIWAQSLPPGTSAQKAELIALTKALELSKGKKANIYTDSRYAFATAHTHGSIYERRGWLTSEGKEIKNKAEIIALLKALFLPQEVAIIHCPGHQKGQDPVAVGNRQADRVARQAAMAEVLTLATEPDNTSHITAGKRTADGSEFEKRTADGSEFESPKKKAKVE

SEQ ID NO: 7082 - protein, 2095 aa, synthetic construct
MPAAKRVKLDGGDKKYSIGLDIGTNSVGWAVITDEYKVPSKKFKVLGNTDRHSIKKNLIGALLFDSGETAEATRLKRTARRRYTRRKNRICYLQEIFSNEMAKVDDSFFHRLEESFLVEEDKKHERHPIFGNIVDEVAYHEKYPTIYHLRKKLVDSTDKADLRLIYLALAHMIKFRGHFLIEGDLNPDNSDVDKLFIQLVQTYNQLFEENPINASGVDAKAILSARLSKSRRLENLIAQLPGEKKNGLFGNLIALSLGLTPNFKSNFDLAEDAKLQLSKDTYDDDLDNLLAQIGDQYADLFLAAKNLSDAILLSDILRVNTEITKAPLSASMIKRYDEHHQDLTLLKALVRQQLPEKYKEIFFDQSKNGYAGYIDGGASQEEFYKFIKPILEKMDGTEELLVKLNREDLLRKQRTFDNGSIPHQIHLGELHAILRRQEDFYPFLKDNREKIEKILTFRIPYYVGPLARGNSRFAWMTRKSEETITPWNFEEVVDKGASAQSFIERMTNFDKNLPNEKVLPKHSLLYEYFTVYNELTKVKYVTEGMRKPAFLSGEQKKAIVDLLFKTNRKVTVKQLKEDYFKKIECFDSVEISGVEDRFNASLGTYHDLLKIIKDKDFLDNEENEDILEDIVLTLTLFEDREMIEERLKTYAHLFDDKVMKQLKRRRYTGWGRLSRKLINGIRDKQSGKTILDFLKSDGFANRNFMQLIHDDSLTFKEDIQKAQVSGQGDSLHEHIANLAGSPAIKKGILQTVKVVDELVKVMGRHKPENIVIEMARENQTTQKGQKNSRERMKRIEEGIKELGSQILKEHPVENTQLQNEKLYLYYLQNGRDMYVDQELDINRLSDYDVDHIVPQSFLKDDSIDNKVLTRSDKARGKSDNVPSEEVVKKMKNYWRQLLNAKLITQRKFDNLTKAERGGLSELDKAGFIKRQLVETRQITKHVAQILDSRMNTKYDENDKLIREVKVITLKSKLVSDFRKDFQFYKVREINNYHHAHDAYLNAVVGTALIKKYPKLESEFVYGDYKVYDVRKMIAKSEQEIGKATAKYFFYSNIMNFFKTEITLANGEIRKRPLIETNGETGEIVWDKGRDFATVRKVLSMPQVNIVKKTEVQTGGFSKESILPKRNSDKLIARKKDWDPKKYGGFDSPTVAYSVLVVAKVEKGKSKKLKSVKELLGITIMERSSFEKNPIDFLEAKGYKEVKKDLIIKLPKYSLFELENGRKRMLASAGELQKGNELALPSKYVNFLYLASHYEKLKGSPEDNEQKQLFVEQHKHYLDEIIEQISEFSKRVILADANLDKVLSAYNKHRDKPIREQAENIIHLFTLTNLGAPAAFKYFDTTIDRKRYTSTKEVLDATLIHQSITGLYETRIDLSQLGGDGGGSSEAAAKGGSGGTLQLEEEYRLFEPESTQKQEMDIWLKNFPQAWAETGGMGTAHCQAPVLIQLKATATPISIRQYPMPHEAYQGIKPHIRRMLDQGILKPCQSPWNTPLLPVKKPGTEDYRPVQDLREVNKRVEDIHPTVPNPYNLLSTLPPSHPWYTVLDLKDAFFCLRLHSESQLLFAFEWRDPEIGLSGQLTWTRLPQGFKNSPTLFNEALHSDLADFRVRYPALVLLQYVDDLLLAAATRTECLEGTKALLETLGNKGYRASAKKAQICLQEVTYLGYSLKDGQRWLTKARKEAILSIPVPKNSRQVREFLGTAGYCRLWIPGFAELAAPLYPLTRPGTLFQWGTEQQLAFEDIKKALLSSPALGLPDITKPFELFIDENSGFAKGVLVQKLGPWKRPVAYLSKKLDTVASGWPPCLRMVAAIAILVKDAGKLTLGQPLTILTSHPVEALVRQPPNKWLSNARMTHYQAMLLDAERVHFGPTVSLNPATLLPLPSGGNHHDCLQILAETHGTRPDLTDQPLPDADLTWYTDGSSFIRNGEREAGAAVTTESEVIWAAPLPPGTSAQRAELIALTQALKMAEGKKLTVYTDSRYAFATTHVHGEIYRRRGWLTSEGKEIKNKNEILALLEALFLPKRLSIIHCPGHQKGDSPQAKGNRLADDTAKKAATETHSSLTVLPAGKRTADGSEFEKRTADGSEFESPKKKAKVE

SEQ ID NO: 7083 - protein, 2176 aa, synthetic construct
MPAAKRVKLDGGDKKYSIGLDIGTNSVGWAVITDEYKVPSKKFKVLGNTDRHSIKKNLIGALLFDSGETAEATRLKRTARRRYTRRKNRICYLQEIFSNEMAKVDDSFFHRLEESFLVEEDKKHERHPIFGNIVDEVAYHEKYPTIYHLRKKLVDSTDKADLRLIYLALAHMIKFRGHFLIEGDLNPDNSDVDKLFIQLVQTYNQLFEENPINASGVDAKAILSARLSKSRRLENLIAQLPGEKKNGLFGNLIALSLGLTPNFKSNFDLAEDAKLQLSKDTYDDDLDNLLAQIGDQYADLFLAAKNLSDAILLSDILRVNTEITKAPLSASMIKRYDEHHQDLTLLKALVRQQLPEKYKEIFFDQSKNGYAGYIDGGASQEEFYKFIKPILEKMDGTEELLVKLNREDLLRKQRTFDNGSIPHQIHLGELHAILRRQEDFYPFLKDNREKIEKILTFRIPYYVGPLARGNSRFAWMTRKSEETITPWNFEEVVDKGASAQSFIERMTNFDKNLPNEKVLPKHSLLYEYFTVYNELTKVKYVTEGMRKPAFLSGEQKKAIVDLLFKTNRKVTVKQLKEDYFKKIECFDSVEISGVEDRFNASLGTYHDLLKIIKDKDFLDNEENEDILEDIVLTLTLFEDREMIEERLKTYAHLFDDKVMKQLKRRRYTGWGRLSRKLINGIRDKQSGKTILDFLKSDGFANRNFMQLIHDDSLTFKEDIQKAQVSGQGDSLHEHIANLAGSPAIKKGILQTVKVVDELVKVMGRHKPENIVIEMARENQTTQKGQKNSRERMKRIEEGIKELGSQILKEHPVENTQLQNEKLYLYYLQNGRDMYVDQELDINRLSDYDVDHIVPQSFLKDDSIDNKVLTRSDKARGKSDNVPSEEVVKKMKNYWRQLLNAKLITQRKFDNLTKAERGGLSELDKAGFIKRQLVETRQITKHVAQILDSRMNTKYDENDKLIREVKVITLKSKLVSDFRKDFQFYKVREINNYHHAHDAYLNAVVGTALIKKYPKLESEFVYGDYKVYDVRKMIAKSEQEIGKATAKYFFYSNIMNFFKTEITLANGEIRKRPLIETNGETGEIVWDKGRDFATVRKVLSMPQVNIVKKTEVQTGGFSKESILPKRNSDKLIARKKDWDPKKYGGFDSPTVAYSVLVVAKVEKGKSKKLKSVKELLGITIMERSSFEKNPIDFLEAKGYKEVKKDLIIKLPKYSLFELENGRKRMLASAGELQKGNELALPSKYVNFLYLASHYEKLKGSPEDNEQKQLFVEQHKHYLDEIIEQISEFSKRVILADANLDKVLSAYNKHRDKPIREQAENIIHLFTLTNLGAPAAFKYFDTTIDRKRYTSTKEVLDATLIHQSITGLYETRIDLSQLGGDGGGSSEAAAKGGSGGMNPLQLLQPLPAEIKGTKLLAHWNSGATITCIPESFLEDEQPIKKTLIKTIHGEKQQNVYYVTFKVKGRKVEAEVIASPYEYILLSPTDVPWLTQQPLQLTILVPLQEYQEKILSKTALPEDQKQQLKTLFVKYDNLWQHWENQVGHRKIRPHNIATGDYPPRPQKQYPINPKAKPSIQIVIDDLLKQGVLTPQNSTMNTPVYPVPKPDGRWRMVLDYREVNKTIPLTAAQNQHSAGILATIVRQKYKTTLDLANGFWAHPITPESYWLTAFTWQGKQYCWTRLPQGFLNSPALFTADVVDLLKEIPNVQVYVDDIYLSHDDPKEHVQQLEKVFQILLQAGYVVSLKKSEIGQKTVEFLGFNITKEGRGLTDTFKTKLLNITPPKDLKQLQSILGLLNFARNFIPNFAELVQPLYNLIASAKGKYIEWSEENTKQLNMVIEALNTASNLEERLPEQRLVIKVNTSPSAGYVRYYNETGKKPIMYLNYVFSKAELKFSMLEKLLTTMHKALIKAMDLAMGQEILVYSPIVSMTKIQKTPLPERKALPIRWITWMTYLEDPRIQFHYDKTLPELKHIPDVYTSSQSPVKHPSQYEGVFYTDGSAIKSPDPTKSNNAGMGIVHATYKPEYQVLNQWSIPLGNHTAQMAEIAAVEFACKKALKIPGPVLVITDSFYVAESANKELPYWKSNGFVNNKKKPLKHISKWKSIAECLSMKPDITIQHEKGISLQIPVFILKGNALADKLATQGSYVVNAGKRTADGSEFEKRTADGSEFESPKKKAKVE

SEQ ID NO: 7084 - protein, 2218 aa, synthetic construct
MPAAKRVKLDGGDKKYSIGLDIGTNSVGWAVITDEYKVPSKKFKVLGNTDRHSIKKNLIGALLFDSGETAEATRLKRTARRRYTRRKNRICYLQEIFSNEMAKVDDSFFHRLEESFLVEEDKKHERHPIFGNIVDEVAYHEKYPTIYHLRKKLVDSTDKADLRLIYLALAHMIKFRGHFLIEGDLNPDNSDVDKLFIQLVQTYNQLFEENPINASGVDAKAILSARLSKSRRLENLIAQLPGEKKNGLFGNLIALSLGLTPNFKSNFDLAEDAKLQLSKDTYDDDLDNLLAQIGDQYADLFLAAKNLSDAILLSDILRVNTEITKAPLSASMIKRYDEHHQDLTLLKALVRQQLPEKYKEIFFDQSKNGYAGYIDGGASQEEFYKFIKPILEKMDGTEELLVKLNREDLLRKQRTFDNGSIPHQIHLGELHAILRRQEDFYPFLKDNREKIEKILTFRIPYYVGPLARGNSRFAWMTRKSEETITPWNFEEVVDKGASAQSFIERMTNFDKNLPNEKVLPKHSLLYEYFTVYNELTKVKYVTEGMRKPAFLSGEQKKAIVDLLFKTNRKVTVKQLKEDYFKKIECFDSVEISGVEDRFNASLGTYHDLLKIIKDKDFLDNEENEDILEDIVLTLTLFEDREMIEERLKTYAHLFDDKVMKQLKRRRYTGWGRLSRKLINGIRDKQSGKTILDFLKSDGFANRNFMQLIHDDSLTFKEDIQKAQVSGQGDSLHEHIANLAGSPAIKKGILQTVKVVDELVKVMGRHKPENIVIEMARENQTTQKGQKNSRERMKRIEEGIKELGSQILKEHPVENTQLQNEKLYLYYLQNGRDMYVDQELDINRLSDYDVDHIVPQSFLKDDSIDNKVLTRSDKARGKSDNVPSEEVVKKMKNYWRQLLNAKLITQRKFDNLTKAERGGLSELDKAGFIKRQLVETRQITKHVAQILDSRMNTKYDENDKLIREVKVITLKSKLVSDFRKDFQFYKVREINNYHHAHDAYLNAVVGTALIKKYPKLESEFVYGDYKVYDVRKMIAKSEQEIGKATAKYFFYSNIMNFFKTEITLANGEIRKRPLIETNGETGEIVWDKGRDFATVRKVLSMPQVNIVKKTEVQTGGFSKESILPKRNSDKLIARKKDWDPKKYGGFDSPTVAYSVLVVAKVEKGKSKKLKSVKELLGITIMERSSFEKNPIDFLEAKGYKEVKKDLIIKLPKYSLFELENGRKRMLASAGELQKGNELALPSKYVNFLYLASHYEKLKGSPEDNEQKQLFVEQHKHYLDEIIEQISEFSKRVILADANLDKVLSAYNKHRDKPIREQAENIIHLFTLTNLGAPAAFKYFDTTIDRKRYTSTKEVLDATLIHQSITGLYETRIDLSQLGGDGGGSSEAAAKGGSGGTLGDQGSRGSDPLPEPRVTLTVEGIPTEFLVNTGAEHSVLTKPMGKMGSKRTVVAGATGSKVYPWTTKRLLKIGQKQVTHSFLVIPECPAPLLGRDLLTKLKAQIQFSTEGPQVTWEDRPAMCLVLNLEEEYRLHEKPVPPSIDPSWLQLFPMVWAEKAGMGLANQVPPVVVELKSDASPVAVRQYPMSKEAREGIRPHIQRFLDLGILVPCQSPWNTPLLPVKKPGTNDYRPVQDLREVNKRVQDIHPTVPNPYNLLSSLPPSHTWYSVLDLKDAFFCLKLHPNSQPLFAFEWRDPEKGNTGQLTWTRLPQGFKNSPTLFNEALHRDLASFRALNPQVVMLQYVDDLLVAAPTYRDCKEGTRRLLQELSKLGYRVSAKKAQLCREEVTYLGYLLKGGKRWLTPARKATVMKIPTPTTPRQVREFLGTAGFCRLWIPGFASLAAPLYPLTRPKVPFTWTEAHQEAFGRIKEALLSAPALALPDLTKPFALYVDEKEGVARGVLTQTLGPWRRPVAYLSKKLDPVASGWPTCLKAIAAVALLLKDADKLTLGQNVLVIAPHNLESIVRQPPDRWMTNARMTHYQSLLLNERVSFAPPAILNPATLLPVESDDTPIHICSEILAEETGTRPDLRDQPLPGVPAWYTDGSSFIMDGRRQAGAAIVDNKRTVWASNLPEGTSAQKAELIALTQALRLAEGKSINIYTDSRYAFATAHVHGAIYKQRGWLTSAGKDIKNKEEILALLEAIHLPKRVAIIHCPGHQRGTDPVATGNRKADEAAKQAAQSTRILTETTKNAGKRTADGSEFEKRTADGSEFESPKKKAKVE

SEQ ID NO: 7085 - protein, 2096 aa, synthetic construct
MPAAKRVKLDGGDKKYSIGLDIGTNSVGWAVITDEYKVPSKKFKVLGNTDRHSIKKNLIGALLFDSGETAEATRLKRTARRRYTRRKNRICYLQEIFSNEMAKVDDSFFHRLEESFLVEEDKKHERHPIFGNIVDEVAYHEKYPTIYHLRKKLVDSTDKADLRLIYLALAHMIKFRGHFLIEGDLNPDNSDVDKLFIQLVQTYNQLFEENPINASGVDAKAILSARLSKSRRLENLIAQLPGEKKNGLFGNLIALSLGLTPNFKSNFDLAEDAKLQLSKDTYDDDLDNLLAQIGDQYADLFLAAKNLSDAILLSDILRVNTEITKAPLSASMIKRYDEHHQDLTLLKALVRQQLPEKYKEIFFDQSKNGYAGYIDGGASQEEFYKFIKPILEKMDGTEELLVKLNREDLLRKQRTFDNGSIPHQIHLGELHAILRRQEDFYPFLKDNREKIEKILTFRIPYYVGPLARGNSRFAWMTRKSEETITPWNFEEVVDKGASAQSFIERMTNFDKNLPNEKVLPKHSLLYEYFTVYNELTKVKYVTEGMRKPAFLSGEQKKAIVDLLFKTNRKVTVKQLKEDYFKKIECFDSVEISGVEDRFNASLGTYHDLLKIIKDKDFLDNEENEDILEDIVLTLTLFEDREMIEERLKTYAHLFDDKVMKQLKRRRYTGWGRLSRKLINGIRDKQSGKTILDFLKSDGFANRNFMQLIHDDSLTFKEDIQKAQVSGQGDSLHEHIANLAGSPAIKKGILQTVKVVDELVKVMGRHKPENIVIEMARENQTTQKGQKNSRERMKRIEEGIKELGSQILKEHPVENTQLQNEKLYLYYLQNGRDMYVDQELDINRLSDYDVDHIVPQSFLKDDSIDNKVLTRSDKARGKSDNVPSEEVVKKMKNYWRQLLNAKLITQRKFDNLTKAERGGLSELDKAGFIKRQLVETRQITKHVAQILDSRMNTKYDENDKLIREVKVITLKSKLVSDFRKDFQFYKVREINNYHHAHDAYLNAVVGTALIKKYPKLESEFVYGDYKVYDVRKMIAKSEQEIGKATAKYFFYSNIMNFFKTEITLANGEIRKRPLIETNGETGEIVWDKGRDFATVRKVLSMPQVNIVKKTEVQTGGFSKESILPKRNSDKLIARKKDWDPKKYGGFDSPTVAYSVLVVAKVEKGKSKKLKSVKELLGITIMERSSFEKNPIDFLEAKGYKEVKKDLIIKLPKYSLFELENGRKRMLASAGELQKGNELALPSKYVNFLYLASHYEKLKGSPEDNEQKQLFVEQHKHYLDEIIEQISEFSKRVILADANLDKVLSAYNKHRDKPIREQAENIIHLFTLTNLGAPAAFKYFDTTIDRKRYTSTKEVLDATLIHQSITGLYETRIDLSQLGGDGGGSSEAAAKGGSGGTLNLEDEYRLYETSAEPEVSPGSTWLSDFPQAWAETGGMGLAVRQAPLIIPLKATSTPVSIKQYPMSQEAKLGIKPHIQRLLDQGILVPCQSPWNTPLLPVKKPGTNDYRPVQDLREVNKRVEDIHPTVPNPYNLLSGLPPSHRWYTVLDLKDAFFCLRLHPTSQPLFAFEWRDPGMGISGQLTWTRLPQGFKNSPTLFNEALHRDLADFRIQHPDLILLQYVDDILLAATSELDCQQGTRALLLTLGNLGYRASAKKAQLCQKQVKYLGYLLKEGQRWLTEARKETVMGQPTPKTPRQLREFLGTAGFCRLWIPGFAEMAAPLYPLTKPGTLFNWGPDQQKAYQEIKQALLTAPALGLPDLTKPFELFVDEKQGYAKGVLTQKLGPWRRPVAYLSKKLDPVAAGWPPCLRMVAAIAVLRKDAGKLTMGQPLVILAPHAVEALVKQPPDRWLSNARMTHYQAMLLDTDRVQFGPVVALNPATLLPLPEEGAPHDCLEILAETHGTRPDLTDQPIPDADHTWYTDGSSFLQEGQRKAGAAVTTETEVIWARALPAGTSAQRAELIALTQALKMAEGKRLNVYTDSRYAFATAHIHGEIYRRRGWLTSEGREIKNKSEILALLKALFLPKRLSIIHCLGHQKGDSAEARGNRLADQAAREAAIKTPPDTSTLLAGKRTADGSEFEKRTADGSEFESPKKKAKVE

SEQ ID NO: 7086 - protein, 2096 aa, synthetic construct
MPAAKRVKLDGGDKKYSIGLDIGTNSVGWAVITDEYKVPSKKFKVLGNTDRHSIKKNLIGALLFDSGETAEATRLKRTARRRYTRRKNRICYLQEIFSNEMAKVDDSFFHRLEESFLVEEDKKHERHPIFGNIVDEVAYHEKYPTIYHLRKKLVDSTDKADLRLIYLALAHMIKFRGHFLIEGDLNPDNSDVDKLFIQLVQTYNQLFEENPINASGVDAKAILSARLSKSRRLENLIAQLPGEKKNGLFGNLIALSLGLTPNFKSNFDLAEDAKLQLSKDTYDDDLDNLLAQIGDQYADLFLAAKNLSDAILLSDILRVNTEITKAPLSASMIKRYDEHHQDLTLLKALVRQQLPEKYKEIFFDQSKNGYAGYIDGGASQEEFYKFIKPILEKMDGTEELLVKLNREDLLRKQRTFDNGSIPHQIHLGELHAILRRQEDFYPFLKDNREKIEKILTFRIPYYVGPLARGNSRFAWMTRKSEETITPWNFEEVVDKGASAQSFIERMTNFDKNLPNEKVLPKHSLLYEYFTVYNELTKVKYVTEGMRKPAFLSGEQKKAIVDLLFKTNRKVTVKQLKEDYFKKIECFDSVEISGVEDRFNASLGTYHDLLKIIKDKDFLDNEENEDILEDIVLTLTLFEDREMIEERLKTYAHLFDDKVMKQLKRRRYTGWGRLSRKLINGIRDKQSGKTILDFLKSDGFANRNFMQLIHDDSLTFKEDIQKAQVSGQGDSLHEHIANLAGSPAIKKGILQTVKVVDELVKVMGRHKPENIVIEMARENQTTQKGQKNSRERMKRIEEGIKELGSQILKEHPVENTQLQNEKLYLYYLQNGRDMYVDQELDINRLSDYDVDHIVPQSFLKDDSIDNKVLTRSDKARGKSDNVPSEEVVKKMKNYWRQLLNAKLITQRKFDNLTKAERGGLSELDKAGFIKRQLVETRQITKHVAQILDSRMNTKYDENDKLIREVKVITLKSKLVSDFRKDFQFYKVREINNYHHAHDAYLNAVVGTALIKKYPKLESEFVYGDYKVYDVRKMIAKSEQEIGKATAKYFFYSNIMNFFKTEITLANGEIRKRPLIETNGETGEIVWDKGRDFATVRKVLSMPQVNIVKKTEVQTGGFSKESILPKRNSDKLIARKKDWDPKKYGGFDSPTVAYSVLVVAKVEKGKSKKLKSVKELLGITIMERSSFEKNPIDFLEAKGYKEVKKDLIIKLPKYSLFELENGRKRMLASAGELQKGNELALPSKYVNFLYLASHYEKLKGSPEDNEQKQLFVEQHKHYLDEIIEQISEFSKRVILADANLDKVLSAYNKHRDKPIREQAENIIHLFTLTNLGAPAAFKYFDTTIDRKRYTSTKEVLDATLIHQSITGLYETRIDLSQLGGDGGGSSEAAAKGGSGGTLGIEDEYRLHETSTEPDVSLGSTWLSDFPQAWAETGGMGLAVRQAPLIIPLKATSTPVSIQQYPMSHEARLGIKPHIQRLLDQGILVPCQSPWNTPLLPVKKPGTNDYRPVQDLREVNKRVEDIHPTVPNPYNLLSGLPPSHQWYTVLDLKDAFFCLRLHPTSQPLFAFEWRDPGMGISGQLTWTRLPQGFKNSPTLFNEALHRDLADFRIQHPDLILLQYVDDILLAATSELDCQQGTRALLQTLGDLGYRASAKKAQICQKQVKYLGYLLREGQRWLTEARKETVMGQPVPKTPRQLREFLGTAGFCRLWIPGFAEMAAPLYPLTKPGTLFSWGPDQQKAYQEIKQALLTAPALGLPDLTKPFELFVDEKQGYAKGVLTQKLGPWRRPVAYLSKKLDPVAAGWPPCLRMVAAIAVLTKDAGKLTMGQPLVILAPHAVEALVKQPPDRWLSNARMTHYQAMLLDTDRVQFGPVVALNPATLLPLPEEGAPHDCLEILAETHGTRPDLTDQPIPDADHTWYTDGSSFLQEGQRKAGAAVTTETEVIWAGALPAGTSAQRAELIALTQALKMAEGKRLNVYTDSRYAFATAHIHGEIYRRRGWLTSEGREIKNKSEILALLKALFLPKRLSIIHCLGHQKGDSAEARGNRLADQAAREAAIKTPPDTSTLLAGKRTADGSEFEKRTADGSEFESPKKKAKVE

SEQ ID NO: 7087 - protein, 2096 aa, synthetic construct
MPAAKRVKLDGGDKKYSIGLDIGTNSVGWAVITDEYKVPSKKFKVLGNTDRHSIKKNLIGALLFDSGETAEATRLKRTARRRYTRRKNRICYLQEIFSNEMAKVDDSFFHRLEESFLVEEDKKHERHPIFGNIVDEVAYHEKYPTIYHLRKKLVDSTDKADLRLIYLALAHMIKFRGHFLIEGDLNPDNSDVDKLFIQLVQTYNQLFEENPINASGVDAKAILSARLSKSRRLENLIAQLPGEKKNGLFGNLIALSLGLTPNFKSNFDLAEDAKLQLSKDTYDDDLDNLLAQIGDQYADLFLAAKNLSDAILLSDILRVNTEITKAPLSASMIKRYDEHHQDLTLLKALVRQQLPEKYKEIFFDQSKNGYAGYIDGGASQEEFYKFIKPILEKMDGTEELLVKLNREDLLRKQRTFDNGSIPHQIHLGELHAILRRQEDFYPFLKDNREKIEKILTFRIPYYVGPLARGNSRFAWMTRKSEETITPWNFEEVVDKGASAQSFIERMTNFDKNLPNEKVLPKHSLLYEYFTVYNELTKVKYVTEGMRKPAFLSGEQKKAIVDLLFKTNRKVTVKQLKEDYFKKIECFDSVEISGVEDRFNASLGTYHDLLKIIKDKDFLDNEENEDILEDIVLTLTLFEDREMIEERLKTYAHLFDDKVMKQLKRRRYTGWGRLSRKLINGIRDKQSGKTILDFLKSDGFANRNFMQLIHDDSLTFKEDIQKAQVSGQGDSLHEHIANLAGSPAIKKGILQTVKVVDELVKVMGRHKPENIVIEMARENQTTQKGQKNSRERMKRIEEGIKELGSQILKEHPVENTQLQNEKLYLYYLQNGRDMYVDQELDINRLSDYDVDHIVPQSFLKDDSIDNKVLTRSDKARGKSDNVPSEEVVKKMKNYWRQLLNAKLITQRKFDNLTKAERGGLSELDKAGFIKRQLVETRQITKHVAQILDSRMNTKYDENDKLIREVKVITLKSKLVSDFRKDFQFYKVREINNYHHAHDAYLNAVVGTALIKKYPKLESEFVYGDYKVYDVRKMIAKSEQEIGKATAKYFFYSNIMNFFKTEITLANGEIRKRPLIETNGETGEIVWDKGRDFATVRKVLSMPQVNIVKKTEVQTGGFSKESILPKRNSDKLIARKKDWDPKKYGGFDSPTVAYSVLVVAKVEKGKSKKLKSVKELLGITIMERSSFEKNPIDFLEAKGYKEVKKDLIIKLPKYSLFELENGRKRMLASAGELQKGNELALPSKYVNFLYLASHYEKLKGSPEDNEQKQLFVEQHKHYLDEIIEQISEFSKRVILADANLDKVLSAYNKHRDKPIREQAENIIHLFTLTNLGAPAAFKYFDTTIDRKRYTSTKEVLDATLIHQSITGLYETRIDLSQLGGDGGGSSEAAAKGGSGGTLNIEDEYRLHETSKGPDVPLGSTWLSDFPQAWAETGGMGLAVRQAPLIIPLKATSTPVSIKQYPMSQEARLGIKPHIQRLLDQGILVPCQSPWNTPLLPVKKPGTNDYRPVQDLREVNKRVEDIHPTVPNPYNLLSGLPPSHQWYTVLDLKDAFFCLRLHPTSQSLFAFEWRDPEMGISGQLTWTRLPQGFKNSPTLFNEALHRDLADFRIQHPDLILLQYVDDLLLAATSELDCQQGTRALLQTLGDLGYRASAKKAQICQKQVKYLGYLLKEGQRWLTEARKETVMGQPTPKTPRQLREFLGTAGFCRLWIPGFAEMAAPLYPLTKPGTLFEWGPDQQKAYQEIKQALLTAPALGLPDLTKPFELFVDEKQGYAKGVLTQKLGPWRRPVAYLSKKLDPVAAGWPPCLRMVAAIAVLTKDAGKLTMGQPLVILAPHAVEALVKQPPDRWLSNARMTHYQALLLDTDRVQFGPIVALNPATLLPLPEEGLQHDCLDILAEAHGTRPDLTDQPLPDADHTWYTDGSSFLQEGQRKAGAAVTTETEVVWAKALPAGTSAQRAELIALTQALKMAEGKKLNVYTDSRYAFATAHIHGEIYRRRGWLTSEGKEIKNKDEILALLKALFLPKRLSIIHCPGHQKGNRAEARGNRMADQAAREVATRETPETSTLLAGKRTADGSEFEKRTADGSEFESPKKKAKVE

SEQ ID NO: 7088 - protein, 2096 aa, synthetic construct
MPAAKRVKLDGGDKKYSIGLDIGTNSVGWAVITDEYKVPSKKFKVLGNTDRHSIKKNLIGALLFDSGETAEATRLKRTARRRYTRRKNRICYLQEIFSNEMAKVDDSFFHRLEESFLVEEDKKHERHPIFGNIVDEVAYHEKYPTIYHLRKKLVDSTDKADLRLIYLALAHMIKFRGHFLIEGDLNPDNSDVDKLFIQLVQTYNQLFEENPINASGVDAKAILSARLSKSRRLENLIAQLPGEKKNGLFGNLIALSLGLTPNFKSNFDLAEDAKLQLSKDTYDDDLDNLLAQIGDQYADLFLAAKNLSDAILLSDILRVNTEITKAPLSASMIKRYDEHHQDLTLLKALVRQQLPEKYKEIFFDQSKNGYAGYIDGGASQEEFYKFIKPILEKMDGTEELLVKLNREDLLRKQRTFDNGSIPHQIHLGELHAILRRQEDFYPFLKDNREKIEKILTFRIPYYVGPLARGNSRFAWMTRKSEETITPWNFEEVVDKGASAQSFIERMTNFDKNLPNEKVLPKHSLLYEYFTVYNELTKVKYVTEGMRKPAFLSGEQKKAIVDLLFKTNRKVTVKQLKEDYFKKIECFDSVEISGVEDRFNASLGTYHDLLKIIKDKDFLDNEENEDILEDIVLTLTLFEDREMIEERLKTYAHLFDDKVMKQLKRRRYTGWGRLSRKLINGIRDKQSGKTILDFLKSDGFANRNFMQLIHDDSLTFKEDIQKAQVSGQGDSLHEHIANLAGSPAIKKGILQTVKVVDELVKVMGRHKPENIVIEMARENQTTQKGQKNSRERMKRIEEGIKELGSQILKEHPVENTQLQNEKLYLYYLQNGRDMYVDQELDINRLSDYDVDHIVPQSFLKDDSIDNKVLTRSDKARGKSDNVPSEEVVKKMKNYWRQLLNAKLITQRKFDNLTKAERGGLSELDKAGFIKRQLVETRQITKHVAQILDSRMNTKYDENDKLIREVKVITLKSKLVSDFRKDFQFYKVREINNYHHAHDAYLNAVVGTALIKKYPKLESEFVYGDYKVYDVRKMIAKSEQEIGKATAKYFFYSNIMNFFKTEITLANGEIRKRPLIETNGETGEIVWDKGRDFATVRKVLSMPQVNIVKKTEVQTGGFSKESILPKRNSDKLIARKKDWDPKKYGGFDSPTVAYSVLVVAKVEKGKSKKLKSVKELLGITIMERSSFEKNPIDFLEAKGYKEVKKDLIIKLPKYSLFELENGRKRMLASAGELQKGNELALPSKYVNFLYLASHYEKLKGSPEDNEQKQLFVEQHKHYLDEIIEQISEFSKRVILADANLDKVLSAYNKHRDKPIREQAENIIHLFTLTNLGAPAAFKYFDTTIDRKRYTSTKEVLDATLIHQSITGLYETRIDLSQLGGDGGGSSEAAAKGGSGGTLNIEDEHRLHETSKEPDVSLGSTWLSDFPQAWAETGGMGLAVRQAPLIIPLKATSTPVSIKQYPMSQEARLGIKPHIQRLLDQGILVPCQSPWNTPLLPVKKPGTNDYRPVQDLREVNKRVEDIHPTVPNPYNLLSGLPPSHQWYTVLDLKDAFFCLRLHPTSQPLFAFEWRDPEMGISGQLTWTRLPQGFKNSPTLFDEALHRDLADFRIQHPDLILLQYVDDLLLAATSELDCQQGTRALLQTLGNLGYRASAKKAQICQKQVKYLGYLLKEGQRWLTEARKETVMGQPTPKTPRQLREFLGTAGFCRLWIPGFAEMAAPLYPLTKTGTLFNWGPDQQKAYQEIKQALLTAPALGLPDLTKPFELFVDEKQGYAKGVLTQKLGPWRRPVAYLSKKLDPVAAGWPPCLRMVAAIAVLTKDAGKLTMGQPLVILAPHAVEALVKQPPDRWLSNARMTHYQALLLDTDRVQFGPVVALNPATLLPLPEEGLQHNCLDILAEAHGTRPDLTDQPLPDADHTWYTDGSSLLQEGQRKAGAAVTTETEVIWAKALPAGTSAQRAELIALTQALKMAEGKKLNVYTDSRYAFATAHIHGEIYRRRGLLTSEGKEIKNKDEILALLKALFLPKRLSIIHCPGHQKGHSAEARGNRMADQAARKAAITETPDTSTLLAGKRTADGSEFEKRTADGSEFESPKKKAKVE

SEQ ID NO: 7089 - protein, 2096 aa, synthetic construct
MPAAKRVKLDGGDKKYSIGLDIGTNSVGWAVITDEYKVPSKKFKVLGNTDRHSIKKNLIGALLFDSGETAEATRLKRTARRRYTRRKNRICYLQEIFSNEMAKVDDSFFHRLEESFLVEEDKKHERHPIFGNIVDEVAYHEKYPTIYHLRKKLVDSTDKADLRLIYLALAHMIKFRGHFLIEGDLNPDNSDVDKLFIQLVQTYNQLFEENPINASGVDAKAILSARLSKSRRLENLIAQLPGEKKNGLFGNLIALSLGLTPNFKSNFDLAEDAKLQLSKDTYDDDLDNLLAQIGDQYADLFLAAKNLSDAILLSDILRVNTEITKAPLSASMIKRYDEHHQDLTLLKALVRQQLPEKYKEIFFDQSKNGYAGYIDGGASQEEFYKFIKPILEKMDGTEELLVKLNREDLLRKQRTFDNGSIPHQIHLGELHAILRRQEDFYPFLKDNREKIEKILTFRIPYYVGPLARGNSRFAWMTRKSEETITPWNFEEVVDKGASAQSFIERMTNFDKNLPNEKVLPKHSLLYEYFTVYNELTKVKYVTEGMRKPAFLSGEQKKAIVDLLFKTNRKVTVKQLKEDYFKKIECFDSVEISGVEDRFNASLGTYHDLLKIIKDKDFLDNEENEDILEDIVLTLTLFEDREMIEERLKTYAHLFDDKVMKQLKRRRYTGWGRLSRKLINGIRDKQSGKTILDFLKSDGFANRNFMQLIHDDSLTFKEDIQKAQVSGQGDSLHEHIANLAGSPAIKKGILQTVKVVDELVKVMGRHKPENIVIEMARENQTTQKGQKNSRERMKRIEEGIKELGSQILKEHPVENTQLQNEKLYLYYLQNGRDMYVDQELDINRLSDYDVDHIVPQSFLKDDSIDNKVLTRSDKARGKSDNVPSEEVVKKMKNYWRQLLNAKLITQRKFDNLTKAERGGLSELDKAGFIKRQLVETRQITKHVAQILDSRMNTKYDENDKLIREVKVITLKSKLVSDFRKDFQFYKVREINNYHHAHDAYLNAVVGTALIKKYPKLESEFVYGDYKVYDVRKMIAKSEQEIGKATAKYFFYSNIMNFFKTEITLANGEIRKRPLIETNGETGEIVWDKGRDFATVRKVLSMPQVNIVKKTEVQTGGFSKESILPKRNSDKLIARKKDWDPKKYGGFDSPTVAYSVLVVAKVEKGKSKKLKSVKELLGITIMERSSFEKNPIDFLEAKGYKEVKKDLIIKLPKYSLFELENGRKRMLASAGELQKGNELALPSKYVNFLYLASHYEKLKGSPEDNEQKQLFVEQHKHYLDEIIEQISEFSKRVILADANLDKVLSAYNKHRDKPIREQAENIIHLFTLTNLGAPAAFKYFDTTIDRKRYTSTKEVLDATLIHQSITGLYETRIDLSQLGGDGGGSSEAAAKGGSGGTLNIEDEHRLHETSKEPDVSLGSTWLSDFPQAWAETGGMGLAVRQAPLIIPLKATSTPVSIKQYPMSQEARLGIKPHIQRLLDQGILVPCQSPWNTPLLPVKKPGTNDYRPVQDLREVNKRVEDIHPTVPNPYNLLSGLPPSHQWYTVLDLKDAFFCLRLHPTSQPLFAFEWRDPEMGISGQLTWTRLPQGFKNSPTLFNEALHRDLADFRIQHPDLILLQYVDDLLLAATSELDCQQGTRALLQTLGNLGYRASAKKAQICQKQVKYLGYLLKEGQRWLTEARKETVMGQPTPKTPRQLREFLGTAGFCRLWIPGFAEMAAPLYPLTKPGTLFNWGPDQQKAYQEIKQALLTAPALGLPDLTKPFELFVDEKQGYAKGVLTQKLGPWRRPVAYLSKKLDPVAAGWPPCLRMVAAIAVLTKDAGKLTMGQPLVILAPHAVEALVKQPPDRWLSNARMTHYQALLLDTDRVQFGPVVALNPATLLPLPEEGLQHNCLDILAEAHGTRPDLTDQPLPDADHTWYTDGSSLLQEGQRKAGAAVTTETEVIWAKALPAGTSAQRAELIALTQALKMAEGKKLNVYTDSRYAFATAHIHGEIYRRRGWLTSEGKEIKNKDEILALLKALFLPKRLSIIHCPGHQKGHSAEARGNRMADQAARKAAITETPDTSTLLAGKRTADGSEFEKRTADGSEFESPKKKAKVE

SEQ ID NO: 7090 - protein, 2087 aa, synthetic construct
MPAAKRVKLDGGDKKYSIGLDIGTNSVGWAVITDEYKVPSKKFKVLGNTDRHSIKKNLIGALLFDSGETAEATRLKRTARRRYTRRKNRICYLQEIFSNEMAKVDDSFFHRLEESFLVEEDKKHERHPIFGNIVDEVAYHEKYPTIYHLRKKLVDSTDKADLRLIYLALAHMIKFRGHFLIEGDLNPDNSDVDKLFIQLVQTYNQLFEENPINASGVDAKAILSARLSKSRRLENLIAQLPGEKKNGLFGNLIALSLGLTPNFKSNFDLAEDAKLQLSKDTYDDDLDNLLAQIGDQYADLFLAAKNLSDAILLSDILRVNTEITKAPLSASMIKRYDEHHQDLTLLKALVRQQLPEKYKEIFFDQSKNGYAGYIDGGASQEEFYKFIKPILEKMDGTEELLVKLNREDLLRKQRTFDNGSIPHQIHLGELHAILRRQEDFYPFLKDNREKIEKILTFRIPYYVGPLARGNSRFAWMTRKSEETITPWNFEEVVDKGASAQSFIERMTNFDKNLPNEKVLPKHSLLYEYFTVYNELTKVKYVTEGMRKPAFLSGEQKKAIVDLLFKTNRKVTVKQLKEDYFKKIECFDSVEISGVEDRFNASLGTYHDLLKIIKDKDFLDNEENEDILEDIVLTLTLFEDREMIEERLKTYAHLFDDKVMKQLKRRRYTGWGRLSRKLINGIRDKQSGKTILDFLKSDGFANRNFMQLIHDDSLTFKEDIQKAQVSGQGDSLHEHIANLAGSPAIKKGILQTVKVVDELVKVMGRHKPENIVIEMARENQTTQKGQKNSRERMKRIEEGIKELGSQILKEHPVENTQLQNEKLYLYYLQNGRDMYVDQELDINRLSDYDVDHIVPQSFLKDDSIDNKVLTRSDKARGKSDNVPSEEVVKKMKNYWRQLLNAKLITQRKFDNLTKAERGGLSELDKAGFIKRQLVETRQITKHVAQILDSRMNTKYDENDKLIREVKVITLKSKLVSDFRKDFQFYKVREINNYHHAHDAYLNAVVGTALIKKYPKLESEFVYGDYKVYDVRKMIAKSEQEIGKATAKYFFYSNIMNFFKTEITLANGEIRKRPLIETNGETGEIVWDKGRDFATVRKVLSMPQVNIVKKTEVQTGGFSKESILPKRNSDKLIARKKDWDPKKYGGFDSPTVAYSVLVVAKVEKGKSKKLKSVKELLGITIMERSSFEKNPIDFLEAKGYKEVKKDLIIKLPKYSLFELENGRKRMLASAGELQKGNELALPSKYVNFLYLASHYEKLKGSPEDNEQKQLFVEQHKHYLDEIIEQISEFSKRVILADANLDKVLSAYNKHRDKPIREQAENIIHLFTLTNLGAPAAFKYFDTTIDRKRYTSTKEVLDATLIHQSITGLYETRIDLSQLGGDGGGSSEAAAKGGSGGVPWLMKKPLQLTVLVPLHEYQERLLQQTALPKEQKELLQKLFLKYDALWQHWENQVGHRRIKPHNIATGTLAPRPQKQYPINPKAKPSIQIVIDDLLKQGVLIQQNSTMNTPVYPVPKPDGKWRMVLDYREVNKTIPLIAAQNQHSAGILSSIYRGKYKTTLDLTNGFWAHPITPESYWLTAFTWQGKQYCWTRLPQGFLNSPALFTADVVDLLKEIPNVQAYVDDIYISHDDPQEHLEQLEKIFSILLNAGYVVSLKKSEIAQREVEFLGFNITKEGRGLTDTFKQKLLNITPPKDLKQLQSILGLLNFARNFIPNYSELVKPLYTIVANANGKFISWTEDNSNQLQHIISVLNQADNLEERNPETRLIIKVNSSPSAGYIRYYNEGSKRPIMYVNYIFSKAEAKFTQTEKLLTTMHKGLIKAMDLAMGQEILVYSPIVSMTKIQRTPLPERKALPVRWITWMTYLEDPRIQFHYDKSLPELQQIPNVTEDVIAKTKHPSEFAMVFYTDGSAIKHPDVNKSHSAGMGIAQVQFIPEYKIVHQWSIPLGDHTAQLAEIAAVEFACKKALKISGPVLIVTDSFYVAESANKELPYWKSNGFLNNKKKPLRHVSKWKSIAECLQLKPDIIIMHEKGHQQPMTTLHTEGNNLADKLATQGSYVVHAGKRTADGSEFEKRTADGSEFESPKKKAKVE

SEQ ID NO: 7091 - protein, 2087 aa, synthetic construct
MPAAKRVKLDGGDKKYSIGLDIGTNSVGWAVITDEYKVPSKKFKVLGNTDRHSIKKNLIGALLFDSGETAEATRLKRTARRRYTRRKNRICYLQEIFSNEMAKVDDSFFHRLEESFLVEEDKKHERHPIFGNIVDEVAYHEKYPTIYHLRKKLVDSTDKADLRLIYLALAHMIKFRGHFLIEGDLNPDNSDVDKLFIQLVQTYNQLFEENPINASGVDAKAILSARLSKSRRLENLIAQLPGEKKNGLFGNLIALSLGLTPNFKSNFDLAEDAKLQLSKDTYDDDLDNLLAQIGDQYADLFLAAKNLSDAILLSDILRVNTEITKAPLSASMIKRYDEHHQDLTLLKALVRQQLPEKYKEIFFDQSKNGYAGYIDGGASQEEFYKFIKPILEKMDGTEELLVKLNREDLLRKQRTFDNGSIPHQIHLGELHAILRRQEDFYPFLKDNREKIEKILTFRIPYYVGPLARGNSRFAWMTRKSEETITPWNFEEVVDKGASAQSFIERMTNFDKNLPNEKVLPKHSLLYEYFTVYNELTKVKYVTEGMRKPAFLSGEQKKAIVDLLFKTNRKVTVKQLKEDYFKKIECFDSVEISGVEDRFNASLGTYHDLLKIIKDKDFLDNEENEDILEDIVLTLTLFEDREMIEERLKTYAHLFDDKVMKQLKRRRYTGWGRLSRKLINGIRDKQSGKTILDFLKSDGFANRNFMQLIHDDSLTFKEDIQKAQVSGQGDSLHEHIANLAGSPAIKKGILQTVKVVDELVKVMGRHKPENIVIEMARENQTTQKGQKNSRERMKRIEEGIKELGSQILKEHPVENTQLQNEKLYLYYLQNGRDMYVDQELDINRLSDYDVDHIVPQSFLKDDSIDNKVLTRSDKARGKSDNVPSEEVVKKMKNYWRQLLNAKLITQRKFDNLTKAERGGLSELDKAGFIKRQLVETRQITKHVAQILDSRMNTKYDENDKLIREVKVITLKSKLVSDFRKDFQFYKVREINNYHHAHDAYLNAVVGTALIKKYPKLESEFVYGDYKVYDVRKMIAKSEQEIGKATAKYFFYSNIMNFFKTEITLANGEIRKRPLIETNGETGEIVWDKGRDFATVRKVLSMPQVNIVKKTEVQTGGFSKESILPKRNSDKLIARKKDWDPKKYGGFDSPTVAYSVLVVAKVEKGKSKKLKSVKELLGITIMERSSFEKNPIDFLEAKGYKEVKKDLIIKLPKYSLFELENGRKRMLASAGELQKGNELALPSKYVNFLYLASHYEKLKGSPEDNEQKQLFVEQHKHYLDEIIEQISEFSKRVILADANLDKVLSAYNKHRDKPIREQAENIIHLFTLTNLGAPAAFKYFDTTIDRKRYTSTKEVLDATLIHQSITGLYETRIDLSQLGGDGGGSSEAAAKGGSGGIPWLMKKPLQLTTLVPLQEYEERLLKQTMLTGSYKEKLQSLFLKYDALWQHWENQVGHRRIKPHHIATGTVNPRPQKQYPINPKAKASIQTVINDLLKQGVLIQQNSIMNTPVYPVPKPDGKWRMVLDYREVNKTIPLIAAQNQHSAGILSSIFRGKYKTTLDLSNGFWAHSITPESYWLTAFTWLGQQYCWTRLPQGFLNSPALFNADVVDLLKEVPNVQVYVDDIYISHDDPREHLEQLEKVFSLLLNAGYVVSLKKSEIAQHEVEFLGFNITKEGRGLTETFKQKLLNITPPRDLKQLQSILGLLNFARNFIPNFSELVKPLYNIIATAPGKYITWTTDNSQQLQNIISMLNSAENLEERNPEVRLIMKVNTSPSAGYIRFYNEFAKRPIMYLNYVYTKAEVKFTNTEKLLTTIHKGLIKALDLGMGQEILVYSPIVSMTKIQKTPLPERKALPIRWITWMSYLEDPRIQFHYDKTLPELQQVPTVTDDIIAKIKHPSEFSMVFYTDGSAIKHPNVNKSHNAGMGIAQVQFKPEFTVINTWSIPLGDHTAQLAEVAAVEFACKKALKIDGPVLIVTDSFYVAESVNKELPYWQSNGFFNNKKKPLKHVSKWKSIADCIQLKPDIIIIHEKGHQPTASTFHTEGNNLADKLATQGSYVVNAGKRTADGSEFEKRTADGSEFESPKKKAKVE

SEQ ID NO: 7092 - protein, 2087 aa, synthetic construct
MPAAKRVKLDGGDKKYSIGLDIGTNSVGWAVITDEYKVPSKKFKVLGNTDRHSIKKNLIGALLFDSGETAEATRLKRTARRRYTRRKNRICYLQEIFSNEMAKVDDSFFHRLEESFLVEEDKKHERHPIFGNIVDEVAYHEKYPTIYHLRKKLVDSTDKADLRLIYLALAHMIKFRGHFLIEGDLNPDNSDVDKLFIQLVQTYNQLFEENPINASGVDAKAILSARLSKSRRLENLIAQLPGEKKNGLFGNLIALSLGLTPNFKSNFDLAEDAKLQLSKDTYDDDLDNLLAQIGDQYADLFLAAKNLSDAILLSDILRVNTEITKAPLSASMIKRYDEHHQDLTLLKALVRQQLPEKYKEIFFDQSKNGYAGYIDGGASQEEFYKFIKPILEKMDGTEELLVKLNREDLLRKQRTFDNGSIPHQIHLGELHAILRRQEDFYPFLKDNREKIEKILTFRIPYYVGPLARGNSRFAWMTRKSEETITPWNFEEVVDKGASAQSFIERMTNFDKNLPNEKVLPKHSLLYEYFTVYNELTKVKYVTEGMRKPAFLSGEQKKAIVDLLFKTNRKVTVKQLKEDYFKKIECFDSVEISGVEDRFNASLGTYHDLLKIIKDKDFLDNEENEDILEDIVLTLTLFEDREMIEERLKTYAHLFDDKVMKQLKRRRYTGWGRLSRKLINGIRDKQSGKTILDFLKSDGFANRNFMQLIHDDSLTFKEDIQKAQVSGQGDSLHEHIANLAGSPAIKKGILQTVKVVDELVKVMGRHKPENIVIEMARENQTTQKGQKNSRERMKRIEEGIKELGSQILKEHPVENTQLQNEKLYLYYLQNGRDMYVDQELDINRLSDYDVDHIVPQSFLKDDSIDNKVLTRSDKARGKSDNVPSEEVVKKMKNYWRQLLNAKLITQRKFDNLTKAERGGLSELDKAGFIKRQLVETRQITKHVAQILDSRMNTKYDENDKLIREVKVITLKSKLVSDFRKDFQFYKVREINNYHHAHDAYLNAVVGTALIKKYPKLESEFVYGDYKVYDVRKMIAKSEQEIGKATAKYFFYSNIMNFFKTEITLANGEIRKRPLIETNGETGEIVWDKGRDFATVRKVLSMPQVNIVKKTEVQTGGFSKESILPKRNSDKLIARKKDWDPKKYGGFDSPTVAYSVLVVAKVEKGKSKKLKSVKELLGITIMERSSFEKNPIDFLEAKGYKEVKKDLIIKLPKYSLFELENGRKRMLASAGELQKGNELALPSKYVNFLYLASHYEKLKGSPEDNEQKQLFVEQHKHYLDEIIEQISEFSKRVILADANLDKVLSAYNKHRDKPIREQAENIIHLFTLTNLGAPAAFKYFDTTIDRKRYTSTKEVLDATLIHQSITGLYETRIDLSQLGGDGGGSSEAAAKGGSGGIPWLMKKPLQLTTLVPLQEYEERLLKQTMLTGSYKEKLQSLFLKYDALWQHWENQVGHRRIKPHHIATGTVNPRPQKQYPINPKAKASIQTVINDLLKQGVLIQQNSIMNTPVYPVPKPDGKWRMVLDYREVNKTIPLIAAQNQHSAGILSSIFRGKYKTTLDLSNGFWAHSITPESYWLTAFTWLGQQYCWTRLPQGFLNSPALFNADVVDLLKEVPNVQVYVDDIYISHDDPREHLEQLEKVFSLLLNAGYVVSLKKSEIAQHEVEFLGFNITKEGRGLTETFKQKLLNITPPRDLKQLQSILGKLNFARNFIPNFSELVKPLYNIIATAPGKYITWTTDNSQQLQNIISMLNSAENLEERNPEVRLIMKVNTSPSAGYIRFYNEFAKRPIMYLNYVYTKAEVKFTNTEKLLTTIHKGLIKALDLGMGQEILVYSPIVSMTKIQKTPLPERKALPIRWITWMSYLEDPRIQFHYDKTLPELQQVPTVTDDIIAKIKHPSEFSMVFYTDGSAIKHPNVNKSHNAGMGIAQVQFKPEFTVINTWSIPLGDHTAQLAEVAAVEFACKKALKIDGPVLIVTDSFYVAESVNKELPYWQSNGFFNNKKKPLKHVSKWKSIADCIQLKPDIIIIHEKGHQPTASTFHTEGNNLADKLATQGSYVVNAGKRTADGSEFEKRTADGSEFESPKKKAKVE

SEQ ID NO: 7093 - protein, 2094 aa, synthetic construct
MPAAKRVKLDGGDKKYSIGLDIGTNSVGWAVITDEYKVPSKKFKVLGNTDRHSIKKNLIGALLFDSGETAEATRLKRTARRRYTRRKNRICYLQEIFSNEMAKVDDSFFHRLEESFLVEEDKKHERHPIFGNIVDEVAYHEKYPTIYHLRKKLVDSTDKADLRLIYLALAHMIKFRGHFLIEGDLNPDNSDVDKLFIQLVQTYNQLFEENPINASGVDAKAILSARLSKSRRLENLIAQLPGEKKNGLFGNLIALSLGLTPNFKSNFDLAEDAKLQLSKDTYDDDLDNLLAQIGDQYADLFLAAKNLSDAILLSDILRVNTEITKAPLSASMIKRYDEHHQDLTLLKALVRQQLPEKYKEIFFDQSKNGYAGYIDGGASQEEFYKFIKPILEKMDGTEELLVKLNREDLLRKQRTFDNGSIPHQIHLGELHAILRRQEDFYPFLKDNREKIEKILTFRIPYYVGPLARGNSRFAWMTRKSEETITPWNFEEVVDKGASAQSFIERMTNFDKNLPNEKVLPKHSLLYEYFTVYNELTKVKYVTEGMRKPAFLSGEQKKAIVDLLFKTNRKVTVKQLKEDYFKKIECFDSVEISGVEDRFNASLGTYHDLLKIIKDKDFLDNEENEDILEDIVLTLTLFEDREMIEERLKTYAHLFDDKVMKQLKRRRYTGWGRLSRKLINGIRDKQSGKTILDFLKSDGFANRNFMQLIHDDSLTFKEDIQKAQVSGQGDSLHEHIANLAGSPAIKKGILQTVKVVDELVKVMGRHKPENIVIEMARENQTTQKGQKNSRERMKRIEEGIKELGSQILKEHPVENTQLQNEKLYLYYLQNGRDMYVDQELDINRLSDYDVDHIVPQSFLKDDSIDNKVLTRSDKARGKSDNVPSEEVVKKMKNYWRQLLNAKLITQRKFDNLTKAERGGLSELDKAGFIKRQLVETRQITKHVAQILDSRMNTKYDENDKLIREVKVITLKSKLVSDFRKDFQFYKVREINNYHHAHDAYLNAVVGTALIKKYPKLESEFVYGDYKVYDVRKMIAKSEQEIGKATAKYFFYSNIMNFFKTEITLANGEIRKRPLIETNGETGEIVWDKGRDFATVRKVLSMPQVNIVKKTEVQTGGFSKESILPKRNSDKLIARKKDWDPKKYGGFDSPTVAYSVLVVAKVEKGKSKKLKSVKELLGITIMERSSFEKNPIDFLEAKGYKEVKKDLIIKLPKYSLFELENGRKRMLASAGELQKGNELALPSKYVNFLYLASHYEKLKGSPEDNEQKQLFVEQHKHYLDEIIEQISEFSKRVILADANLDKVLSAYNKHRDKPIREQAENIIHLFTLTNLGAPAAFKYFDTTIDRKRYTSTKEVLDATLIHQSITGLYETRIDLSQLGGDGGGSSEAAAKGGSGGVLNLEEEYRLHEKPVPSSIDPSWLQLFPTVWAERAGMGLANQVPPVVVELRSGASPVAVRQYPMSKEAREGIRPHIQRFLDLGVLVPCQSPWNTPLLPVKKPGTNDYRPVQDLREINKRVQDIHPTVPNPYNLLSSLPPSHTWYSVLDLKDAFFCLKLHPNSQPLFAFEWRDPEKGNTGQLTWTRLPQGFKNSPTLFNEALHRDLAPFRALNPQVVLLQYVDDLLVAAPTYRDCKEGTQKLLQELSKLGYRVSAKKAQLCQKEVTYLGYLLKEGKRWLTPARKATVMKIPPPTTPRQVREFLGKAGFCRLFIPGFASLAAPLYPLTKPSIPFIWTEEHQKAFDRIKEALLSAPALALPDLTKPFTLYVDERAGVARGVLTQTLGPWRRPVAYLSKKLDPVASGWPTCLKAVAAVALLLKDADKLTLGQNVTVIASHSLESIVRQPPDRWMTNARMTHYQSLLLNERVSFAPPAVLNPATLLPVESEATPVHRCSEILAEETGTRRDLKDQPLPGVPAWYTDGSSFIAEGKRRAGAAIVDGKRTVWASSLPEGTSAQKAELVALTQALRLAEGKDINIYTDSRYAFATAHIHGAIYKQRGWLTSAGKDIKNKEEILALLEAIHLPKRVAIIHCPGHQKGNDPVATGNRRADEAAKQAALSTRVLAETTKPAGKRTADGSEFEKRTADGSEFESPKKKAKVE

SEQ ID NO: 7094 - protein, 2096 aa, synthetic construct
MPAAKRVKLDGGDKKYSIGLDIGTNSVGWAVITDEYKVPSKKFKVLGNTDRHSIKKNLIGALLFDSGETAEATRLKRTARRRYTRRKNRICYLQEIFSNEMAKVDDSFFHRLEESFLVEEDKKHERHPIFGNIVDEVAYHEKYPTIYHLRKKLVDSTDKADLRLIYLALAHMIKFRGHFLIEGDLNPDNSDVDKLFIQLVQTYNQLFEENPINASGVDAKAILSARLSKSRRLENLIAQLPGEKKNGLFGNLIALSLGLTPNFKSNFDLAEDAKLQLSKDTYDDDLDNLLAQIGDQYADLFLAAKNLSDAILLSDILRVNTEITKAPLSASMIKRYDEHHQDLTLLKALVRQQLPEKYKEIFFDQSKNGYAGYIDGGASQEEFYKFIKPILEKMDGTEELLVKLNREDLLRKQRTFDNGSIPHQIHLGELHAILRRQEDFYPFLKDNREKIEKILTFRIPYYVGPLARGNSRFAWMTRKSEETITPWNFEEVVDKGASAQSFIERMTNFDKNLPNEKVLPKHSLLYEYFTVYNELTKVKYVTEGMRKPAFLSGEQKKAIVDLLFKTNRKVTVKQLKEDYFKKIECFDSVEISGVEDRFNASLGTYHDLLKIIKDKDFLDNEENEDILEDIVLTLTLFEDREMIEERLKTYAHLFDDKVMKQLKRRRYTGWGRLSRKLINGIRDKQSGKTILDFLKSDGFANRNFMQLIHDDSLTFKEDIQKAQVSGQGDSLHEHIANLAGSPAIKKGILQTVKVVDELVKVMGRHKPENIVIEMARENQTTQKGQKNSRERMKRIEEGIKELGSQILKEHPVENTQLQNEKLYLYYLQNGRDMYVDQELDINRLSDYDVDHIVPQSFLKDDSIDNKVLTRSDKARGKSDNVPSEEVVKKMKNYWRQLLNAKLITQRKFDNLTKAERGGLSELDKAGFIKRQLVETRQITKHVAQILDSRMNTKYDENDKLIREVKVITLKSKLVSDFRKDFQFYKVREINNYHHAHDAYLNAVVGTALIKKYPKLESEFVYGDYKVYDVRKMIAKSEQEIGKATAKYFFYSNIMNFFKTEITLANGEIRKRPLIETNGETGEIVWDKGRDFATVRKVLSMPQVNIVKKTEVQTGGFSKESILPKRNSDKLIARKKDWDPKKYGGFDSPTVAYSVLVVAKVEKGKSKKLKSVKELLGITIMERSSFEKNPIDFLEAKGYKEVKKDLIIKLPKYSLFELENGRKRMLASAGELQKGNELALPSKYVNFLYLASHYEKLKGSPEDNEQKQLFVEQHKHYLDEIIEQISEFSKRVILADANLDKVLSAYNKHRDKPIREQAENIIHLFTLTNLGAPAAFKYFDTTIDRKRYTSTKEVLDATLIHQSITGLYETRIDLSQLGGDGGGSSEAAAKGGSGGTLNIEDEYRLHETSKEPDVPLGSTWLSDFPQAWAETGGMGLAVRQAPLIIPLKATSTPVSIKQYPMSQEARLGIKPHIQRLLDQGILVPCQSPWNTPLLPVKKPGTNDYRPVQDLREVNKRVEDIHPTVPNPYNLLSGLPPSHQWYTVLDLKDAFFCLRLHPTSQPLFAFEWRDPEMGISGQLTWTRLPQGFKNSPTLFDEALHRDLADFRIQHPDLILLQYVDDLLLAATSEQDCQRGTRALLQTLGNLGYRASAKKAQICQKQVKYLGYLLKEGQRWLTEARKETVMGQPTPKTPRQLREFLGTAGFCRLWIPGFAEMAAPLYPLTKTGTLFNWGPDQQKAYQEIKQALLTAPALGLPDLTKPFELFVDEKQGYAKGVLTQKLGPWRRPVAYLSKKLDPVAAGWPPCLRMVAAIAVLTKDAGKLTMGQPLVILAPHAVEALVKQPPDRWLSNARMTHYQAMLLDTDRVQFGPVVALNPATLLPLPEKEAPHDCLEILAETHGTRPDLTDQPIPDADYTWYTDGSSFLQEGQRRAGAAVTTETEVIWARALPAGTSAQRAELIALTQALKMAEGKKLNVYTDSRYAFATAHVHGEIYRRRGLLTSEGREIKNKNEILALLKALFLPKRLSIIHCPGHQKGNSAEARGNRMADQAAREAAMKAVLETSTLLAGKRTADGSEFEKRTADGSEFESPKKKAKVE

SEQ ID NO: 7095 - protein, 2096 aa, synthetic construct
MPAAKRVKLDGGDKKYSIGLDIGTNSVGWAVITDEYKVPSKKFKVLGNTDRHSIKKNLIGALLFDSGETAEATRLKRTARRRYTRRKNRICYLQEIFSNEMAKVDDSFFHRLEESFLVEEDKKHERHPIFGNIVDEVAYHEKYPTIYHLRKKLVDSTDKADLRLIYLALAHMIKFRGHFLIEGDLNPDNSDVDKLFIQLVQTYNQLFEENPINASGVDAKAILSARLSKSRRLENLIAQLPGEKKNGLFGNLIALSLGLTPNFKSNFDLAEDAKLQLSKDTYDDDLDNLLAQIGDQYADLFLAAKNLSDAILLSDILRVNTEITKAPLSASMIKRYDEHHQDLTLLKALVRQQLPEKYKEIFFDQSKNGYAGYIDGGASQEEFYKFIKPILEKMDGTEELLVKLNREDLLRKQRTFDNGSIPHQIHLGELHAILRRQEDFYPFLKDNREKIEKILTFRIPYYVGPLARGNSRFAWMTRKSEETITPWNFEEVVDKGASAQSFIERMTNFDKNLPNEKVLPKHSLLYEYFTVYNELTKVKYVTEGMRKPAFLSGEQKKAIVDLLFKTNRKVTVKQLKEDYFKKIECFDSVEISGVEDRFNASLGTYHDLLKIIKDKDFLDNEENEDILEDIVLTLTLFEDREMIEERLKTYAHLFDDKVMKQLKRRRYTGWGRLSRKLINGIRDKQSGKTILDFLKSDGFANRNFMQLIHDDSLTFKEDIQKAQVSGQGDSLHEHIANLAGSPAIKKGILQTVKVVDELVKVMGRHKPENIVIEMARENQTTQKGQKNSRERMKRIEEGIKELGSQILKEHPVENTQLQNEKLYLYYLQNGRDMYVDQELDINRLSDYDVDHIVPQSFLKDDSIDNKVLTRSDKARGKSDNVPSEEVVKKMKNYWRQLLNAKLITQRKFDNLTKAERGGLSELDKAGFIKRQLVETRQITKHVAQILDSRMNTKYDENDKLIREVKVITLKSKLVSDFRKDFQFYKVREINNYHHAHDAYLNAVVGTALIKKYPKLESEFVYGDYKVYDVRKMIAKSEQEIGKATAKYFFYSNIMNFFKTEITLANGEIRKRPLIETNGETGEIVWDKGRDFATVRKVLSMPQVNIVKKTEVQTGGFSKESILPKRNSDKLIARKKDWDPKKYGGFDSPTVAYSVLVVAKVEKGKSKKLKSVKELLGITIMERSSFEKNPIDFLEAKGYKEVKKDLIIKLPKYSLFELENGRKRMLASAGELQKGNELALPSKYVNFLYLASHYEKLKGSPEDNEQKQLFVEQHKHYLDEIIEQISEFSKRVILADANLDKVLSAYNKHRDKPIREQAENIIHLFTLTNLGAPAAFKYFDTTIDRKRYTSTKEVLDATLIHQSITGLYETRIDLSQLGGDGGGSSEAAAKGGSGGTLNIEDEYRLHETSKEPDVPLGSTWLSDFPQAWAETGGMGLAVRQAPLIIPLKATSTPVSIKQYPMSQEARLGIKPHIQRLLDQGILVPCQSPWNTPLLPVKKPGTNDYRPVQDLREVNKRVEDIHPTVPNPYNLLSGLPPSHQWYTVLDLKDAFFCLRLHPTSQPLFAFEWRDPEMGISGQLTWTRLPQGFKNSPTLFNEALHRDLADFRIQHPDLILLQYVDDLLLAATSEQDCQRGTRALLQTLGNLGYRASAKKAQICQKQVKYLGYLLKEGQRWLTEARKETVMGQPTPKTPRQLREFLGTAGFCRLWIPGFAEMAAPLYPLTKPGTLFNWGPDQQKAYQEIKQALLTAPALGLPDLTKPFELFVDEKQGYAKGVLTQKLGPWRRPVAYLSKKLDPVAAGWPPCLRMVAAIAVLTKDAGKLTMGQPLVILAPHAVEALVKQPPDRWLSNARMTHYQAMLLDTDRVQFGPVVALNPATLLPLPEKEAPHDCLEILAETHGTRPDLTDQPIPDADYTWYTDGSSFLQEGQRRAGAAVTTETEVIWARALPAGTSAQRAELIALTQALKMAEGKKLNVYTDSRYAFATAHVHGEIYRRRGWLTSEGREIKNKNEILALLKALFLPKRLSIIHCPGHQKGNSAEARGNRMADQAAREAAMKAVLETSTLLAGKRTADGSEFEKRTADGSEFESPKKKAKVE

SEQ ID NO: 7096 - protein, 2098 aa, synthetic construct
MPAAKRVKLDGGDKKYSIGLDIGTNSVGWAVITDEYKVPSKKFKVLGNTDRHSIKKNLIGALLFDSGETAEATRLKRTARRRYTRRKNRICYLQEIFSNEMAKVDDSFFHRLEESFLVEEDKKHERHPIFGNIVDEVAYHEKYPTIYHLRKKLVDSTDKADLRLIYLALAHMIKFRGHFLIEGDLNPDNSDVDKLFIQLVQTYNQLFEENPINASGVDAKAILSARLSKSRRLENLIAQLPGEKKNGLFGNLIALSLGLTPNFKSNFDLAEDAKLQLSKDTYDDDLDNLLAQIGDQYADLFLAAKNLSDAILLSDILRVNTEITKAPLSASMIKRYDEHHQDLTLLKALVRQQLPEKYKEIFFDQSKNGYAGYIDGGASQEEFYKFIKPILEKMDGTEELLVKLNREDLLRKQRTFDNGSIPHQIHLGELHAILRRQEDFYPFLKDNREKIEKILTFRIPYYVGPLARGNSRFAWMTRKSEETITPWNFEEVVDKGASAQSFIERMTNFDKNLPNEKVLPKHSLLYEYFTVYNELTKVKYVTEGMRKPAFLSGEQKKAIVDLLFKTNRKVTVKQLKEDYFKKIECFDSVEISGVEDRFNASLGTYHDLLKIIKDKDFLDNEENEDILEDIVLTLTLFEDREMIEERLKTYAHLFDDKVMKQLKRRRYTGWGRLSRKLINGIRDKQSGKTILDFLKSDGFANRNFMQLIHDDSLTFKEDIQKAQVSGQGDSLHEHIANLAGSPAIKKGILQTVKVVDELVKVMGRHKPENIVIEMARENQTTQKGQKNSRERMKRIEEGIKELGSQILKEHPVENTQLQNEKLYLYYLQNGRDMYVDQELDINRLSDYDVDHIVPQSFLKDDSIDNKVLTRSDKARGKSDNVPSEEVVKKMKNYWRQLLNAKLITQRKFDNLTKAERGGLSELDKAGFIKRQLVETRQITKHVAQILDSRMNTKYDENDKLIREVKVITLKSKLVSDFRKDFQFYKVREINNYHHAHDAYLNAVVGTALIKKYPKLESEFVYGDYKVYDVRKMIAKSEQEIGKATAKYFFYSNIMNFFKTEITLANGEIRKRPLIETNGETGEIVWDKGRDFATVRKVLSMPQVNIVKKTEVQTGGFSKESILPKRNSDKLIARKKDWDPKKYGGFDSPTVAYSVLVVAKVEKGKSKKLKSVKELLGITIMERSSFEKNPIDFLEAKGYKEVKKDLIIKLPKYSLFELENGRKRMLASAGELQKGNELALPSKYVNFLYLASHYEKLKGSPEDNEQKQLFVEQHKHYLDEIIEQISEFSKRVILADANLDKVLSAYNKHRDKPIREQAENIIHLFTLTNLGAPAAFKYFDTTIDRKRYTSTKEVLDATLIHQSITGLYETRIDLSQLGGDGGEAAAKGGSGSSGGTAPLEEEYRLFLEAPIQNVTLLEQWKREIPKVWAEINPPGLASTQAPIHVQLLSTALPVRVRQYPITLEAKRSLRETIRKFRAAGILRPVHSPWNTPLLPVRKSGTSEYRMVQDLREVNKRVETIHPTVPNPYTLLSLLPPDRIWYSVLDLKDAFFCIPLAPESQLIFAFEWADAEEGESGQLTWTRLPQGFKNSPTLFNEALNRDLQGFRLDHPSVSLLQYVDDLLIAADTQAACLSATRDLLMTLAELGYRVSGKKAQLCQEEVTYLGFKIHKGSRSLSNSRTQAILQIPVPKTKRQVREFLGTIGYCRLWIPGFAELAQPLYAATRPGNDPLVWGEKEEEAFQSLKLALTQPPALALPSLDKPFQLFVEETSGAAKGVLTQALGPWKRPVAYLSKRLDPVAAGWPRCLRAIAAAALLTREASKLTFGQDIEITSSHNLESLLRSPPDKWLTNARITQYQVLLLDPPRVRFKQTAALNPATLLPETDDTLPIHHCLDTLDSLTSTRPDLTDQPLAQAEATLFTDGSSYIRDGKRYAGAAVVTLDSVIWAEPLPIGTSAQKAELIALTKALEWSKDKSVNIYTDSRYAFATLHVHGMIYRERGWLTAGGKAIKNAPEILALLTAVWLPKRVAVMHCKGHQKDDAPTSTGNRRADEVAREVAIRPLSTQATISAGKRTADGSEFEKRTADGSEFESPKKKAKVE

SEQ ID NO: 7097 - protein, 2102 aa, synthetic construct
MPAAKRVKLDGGDKKYSIGLDIGTNSVGWAVITDEYKVPSKKFKVLGNTDRHSIKKNLIGALLFDSGETAEATRLKRTARRRYTRRKNRICYLQEIFSNEMAKVDDSFFHRLEESFLVEEDKKHERHPIFGNIVDEVAYHEKYPTIYHLRKKLVDSTDKADLRLIYLALAHMIKFRGHFLIEGDLNPDNSDVDKLFIQLVQTYNQLFEENPINASGVDAKAILSARLSKSRRLENLIAQLPGEKKNGLFGNLIALSLGLTPNFKSNFDLAEDAKLQLSKDTYDDDLDNLLAQIGDQYADLFLAAKNLSDAILLSDILRVNTEITKAPLSASMIKRYDEHHQDLTLLKALVRQQLPEKYKEIFFDQSKNGYAGYIDGGASQEEFYKFIKPILEKMDGTEELLVKLNREDLLRKQRTFDNGSIPHQIHLGELHAILRRQEDFYPFLKDNREKIEKILTFRIPYYVGPLARGNSRFAWMTRKSEETITPWNFEEVVDKGASAQSFIERMTNFDKNLPNEKVLPKHSLLYEYFTVYNELTKVKYVTEGMRKPAFLSGEQKKAIVDLLFKTNRKVTVKQLKEDYFKKIECFDSVEISGVEDRFNASLGTYHDLLKIIKDKDFLDNEENEDILEDIVLTLTLFEDREMIEERLKTYAHLFDDKVMKQLKRRRYTGWGRLSRKLINGIRDKQSGKTILDFLKSDGFANRNFMQLIHDDSLTFKEDIQKAQVSGQGDSLHEHIANLAGSPAIKKGILQTVKVVDELVKVMGRHKPENIVIEMARENQTTQKGQKNSRERMKRIEEGIKELGSQILKEHPVENTQLQNEKLYLYYLQNGRDMYVDQELDINRLSDYDVDHIVPQSFLKDDSIDNKVLTRSDKARGKSDNVPSEEVVKKMKNYWRQLLNAKLITQRKFDNLTKAERGGLSELDKAGFIKRQLVETRQITKHVAQILDSRMNTKYDENDKLIREVKVITLKSKLVSDFRKDFQFYKVREINNYHHAHDAYLNAVVGTALIKKYPKLESEFVYGDYKVYDVRKMIAKSEQEIGKATAKYFFYSNIMNFFKTEITLANGEIRKRPLIETNGETGEIVWDKGRDFATVRKVLSMPQVNIVKKTEVQTGGFSKESILPKRNSDKLIARKKDWDPKKYGGFDSPTVAYSVLVVAKVEKGKSKKLKSVKELLGITIMERSSFEKNPIDFLEAKGYKEVKKDLIIKLPKYSLFELENGRKRMLASAGELQKGNELALPSKYVNFLYLASHYEKLKGSPEDNEQKQLFVEQHKHYLDEIIEQISEFSKRVILADANLDKVLSAYNKHRDKPIREQAENIIHLFTLTNLGAPAAFKYFDTTIDRKRYTSTKEVLDATLIHQSITGLYETRIDLSQLGGDGGEAAAKGGSGSSGGTVSLQDEHRLFDIPVTTSLPDVWLQDFPQAWAETGGLGRAKCQAPIIIDLKPTAVPVSIKQYPMSLEAHMGIRQHIIKFLELGVLRPCRSPWNTPLLPVKKPGTQDYRPVQDLREINKRTVDIHPTVPNPYNLLSTLKPDYSWYTVLDLKDAFFCLPLAPQSQELFAFEWKDPERGISGQLTWTRLPQGFKNSPTLFNEALHRDLTDFRTQHPEVTLLQYVDDLLLAAPTKKACTQGTRHLLQELGEKGYRASAKKAQICQTKVTYLGYILSEGKRWLTPGRIETVARIPPPRNPREVREFLGTAGFCRLWIPGFAELAAPLYALTKPSTPFTWQTEHQLAFEALKKALLSAPALGLPDTSKPFTLFLDERQGIAKGVLTQKLGPWKRPVAYLSKKLDPVAAGWPPCLRIMAATAMLVKDSAKLTLGQPLTVITPHTLEAIVRQPPDRWITNARLTHYQALLLDTDRVQFGPPVTLNPATLLPVPENQPSPHDCRQVLAETHGTREDLKDQELPDADHTWYTDGSSYLDSGTRRAGAAVVDGHNTIWAQSLPPGTSAQKAELIALTKALELSKGKKANIYTDSRYAFATAHTHGSIYERRGWLTSEGKEIKNKAEIIALLKALFLPQEVAIIHCPGHQKGQDPVAVGNRQADRVARQAAMAEVLTLATEPDNTSHITAGKRTADGSEFEKRTADGSEFESPKKKAKVE

SEQ ID NO: 7098 - protein, 2218 aa, synthetic construct
MPAAKRVKLDGGDKKYSIGLDIGTNSVGWAVITDEYKVPSKKFKVLGNTDRHSIKKNLIGALLFDSGETAEATRLKRTARRRYTRRKNRICYLQEIFSNEMAKVDDSFFHRLEESFLVEEDKKHERHPIFGNIVDEVAYHEKYPTIYHLRKKLVDSTDKADLRLIYLALAHMIKFRGHFLIEGDLNPDNSDVDKLFIQLVQTYNQLFEENPINASGVDAKAILSARLSKSRRLENLIAQLPGEKKNGLFGNLIALSLGLTPNFKSNFDLAEDAKLQLSKDTYDDDLDNLLAQIGDQYADLFLAAKNLSDAILLSDILRVNTEITKAPLSASMIKRYDEHHQDLTLLKALVRQQLPEKYKEIFFDQSKNGYAGYIDGGASQEEFYKFIKPILEKMDGTEELLVKLNREDLLRKQRTFDNGSIPHQIHLGELHAILRRQEDFYPFLKDNREKIEKILTFRIPYYVGPLARGNSRFAWMTRKSEETITPWNFEEVVDKGASAQSFIERMTNFDKNLPNEKVLPKHSLLYEYFTVYNELTKVKYVTEGMRKPAFLSGEQKKAIVDLLFKTNRKVTVKQLKEDYFKKIECFDSVEISGVEDRFNASLGTYHDLLKIIKDKDFLDNEENEDILEDIVLTLTLFEDREMIEERLKTYAHLFDDKVMKQLKRRRYTGWGRLSRKLINGIRDKQSGKTILDFLKSDGFANRNFMQLIHDDSLTFKEDIQKAQVSGQGDSLHEHIANLAGSPAIKKGILQTVKVVDELVKVMGRHKPENIVIEMARENQTTQKGQKNSRERMKRIEEGIKELGSQILKEHPVENTQLQNEKLYLYYLQNGRDMYVDQELDINRLSDYDVDHIVPQSFLKDDSIDNKVLTRSDKARGKSDNVPSEEVVKKMKNYWRQLLNAKLITQRKFDNLTKAERGGLSELDKAGFIKRQLVETRQITKHVAQILDSRMNTKYDENDKLIREVKVITLKSKLVSDFRKDFQFYKVREINNYHHAHDAYLNAVVGTALIKKYPKLESEFVYGDYKVYDVRKMIAKSEQEIGKATAKYFFYSNIMNFFKTEITLANGEIRKRPLIETNGETGEIVWDKGRDFATVRKVLSMPQVNIVKKTEVQTGGFSKESILPKRNSDKLIARKKDWDPKKYGGFDSPTVAYSVLVVAKVEKGKSKKLKSVKELLGITIMERSSFEKNPIDFLEAKGYKEVKKDLIIKLPKYSLFELENGRKRMLASAGELQKGNELALPSKYVNFLYLASHYEKLKGSPEDNEQKQLFVEQHKHYLDEIIEQISEFSKRVILADANLDKVLSAYNKHRDKPIREQAENIIHLFTLTNLGAPAAFKYFDTTIDRKRYTSTKEVLDATLIHQSITGLYETRIDLSQLGGDGGEAAAKGGSGSSGGTLGDQGSRGSDPLPEPRVTLTVEGIPTEFLVNTGAEHSVLTKPMGKMGSKRTVVAGATGSKVYPWTTKRLLKIGQKQVTHSFLVIPECPAPLLGRDLLTKLKAQIQFSTEGPQVTWEDRPAMCLVLNLEEEYRLHEKPVPPSIDPSWLQLFPMVWAEKAGMGLANQVPPVVVELKSDASPVAVRQYPMSKEAREGIRPHIQRFLDLGILVPCQSPWNTPLLPVKKPGTNDYRPVQDLREVNKRVQDIHPTVPNPYNLLSSLPPSHTWYSVLDLKDAFFCLKLHPNSQPLFAFEWRDPEKGNTGQLTWTRLPQGFKNSPTLFNEALHRDLASFRALNPQVVMLQYVDDLLVAAPTYRDCKEGTRRLLQELSKLGYRVSAKKAQLCREEVTYLGYLLKGGKRWLTPARKATVMKIPTPTTPRQVREFLGTAGFCRLWIPGFASLAAPLYPLTRPKVPFTWTEAHQEAFGRIKEALLSAPALALPDLTKPFALYVDEKEGVARGVLTQTLGPWRRPVAYLSKKLDPVASGWPTCLKAIAAVALLLKDADKLTLGQNVLVIAPHNLESIVRQPPDRWMTNARMTHYQSLLLNERVSFAPPAILNPATLLPVESDDTPIHICSEILAEETGTRPDLRDQPLPGVPAWYTDGSSFIMDGRRQAGAAIVDNKRTVWASNLPEGTSAQKAELIALTQALRLAEGKSINIYTDSRYAFATAHVHGAIYKQRGWLTSAGKDIKNKEEILALLEAIHLPKRVAIIHCPGHQRGTDPVATGNRKADEAAKQAAQSTRILTETTKNAGKRTADGSEFEKRTADGSEFESPKKKAKVE

SEQ ID NO: 7099 - protein, 2218 aa, synthetic construct
MPAAKRVKLDGGDKKYSIGLDIGTNSVGWAVITDEYKVPSKKFKVLGNTDRHSIKKNLIGALLFDSGETAEATRLKRTARRRYTRRKNRICYLQEIFSNEMAKVDDSFFHRLEESFLVEEDKKHERHPIFGNIVDEVAYHEKYPTIYHLRKKLVDSTDKADLRLIYLALAHMIKFRGHFLIEGDLNPDNSDVDKLFIQLVQTYNQLFEENPINASGVDAKAILSARLSKSRRLENLIAQLPGEKKNGLFGNLIALSLGLTPNFKSNFDLAEDAKLQLSKDTYDDDLDNLLAQIGDQYADLFLAAKNLSDAILLSDILRVNTEITKAPLSASMIKRYDEHHQDLTLLKALVRQQLPEKYKEIFFDQSKNGYAGYIDGGASQEEFYKFIKPILEKMDGTEELLVKLNREDLLRKQRTFDNGSIPHQIHLGELHAILRRQEDFYPFLKDNREKIEKILTFRIPYYVGPLARGNSRFAWMTRKSEETITPWNFEEVVDKGASAQSFIERMTNFDKNLPNEKVLPKHSLLYEYFTVYNELTKVKYVTEGMRKPAFLSGEQKKAIVDLLFKTNRKVTVKQLKEDYFKKIECFDSVEISGVEDRFNASLGTYHDLLKIIKDKDFLDNEENEDILEDIVLTLTLFEDREMIEERLKTYAHLFDDKVMKQLKRRRYTGWGRLSRKLINGIRDKQSGKTILDFLKSDGFANRNFMQLIHDDSLTFKEDIQKAQVSGQGDSLHEHIANLAGSPAIKKGILQTVKVVDELVKVMGRHKPENIVIEMARENQTTQKGQKNSRERMKRIEEGIKELGSQILKEHPVENTQLQNEKLYLYYLQNGRDMYVDQELDINRLSDYDVDHIVPQSFLKDDSIDNKVLTRSDKARGKSDNVPSEEVVKKMKNYWRQLLNAKLITQRKFDNLTKAERGGLSELDKAGFIKRQLVETRQITKHVAQILDSRMNTKYDENDKLIREVKVITLKSKLVSDFRKDFQFYKVREINNYHHAHDAYLNAVVGTALIKKYPKLESEFVYGDYKVYDVRKMIAKSEQEIGKATAKYFFYSNIMNFFKTEITLANGEIRKRPLIETNGETGEIVWDKGRDFATVRKVLSMPQVNIVKKTEVQTGGFSKESILPKRNSDKLIARKKDWDPKKYGGFDSPTVAYSVLVVAKVEKGKSKKLKSVKELLGITIMERSSFEKNPIDFLEAKGYKEVKKDLIIKLPKYSLFELENGRKRMLASAGELQKGNELALPSKYVNFLYLASHYEKLKGSPEDNEQKQLFVEQHKHYLDEIIEQISEFSKRVILADANLDKVLSAYNKHRDKPIREQAENIIHLFTLTNLGAPAAFKYFDTTIDRKRYTSTKEVLDATLIHQSITGLYETRIDLSQLGGDGGEAAAKGGSGSSGGTLGDQGSRGSDPLPEPRVTLTVEGIPTEFLVNTGAEHSVLTKPMGKMGSKRTVVAGATGSKVYPWTTKRLLKIGQKQVTHSFLVIPECPAPLLGRDLLTKLKAQIQFSTEGPQVTWEDRPAMCLVLNLEEEYRLHEKPVPPSIDPSWLQLFPMVWAEKAGMGLANQVPPVVVELKSDASPVAVRQYPMSKEAREGIRPHIQRFLDLGILVPCQSPWNTPLLPVKKPGTNDYRPVQDLREVNKRVQDIHPTVPNPYNLLSSLPPSHTWYSVLDLKDAFFCLKLHPNSQPLFAFEWRDPEKGNTGQLTWTRLPQGFKNSPTLFNEALHRDLASFRALNPQVVMLQYVDDLLVAAPTYRDCKEGTRRLLQELSKLGYRVSAKKAQLCREEVTYLGYLLKGGKRWLTPARKATVMKIPTPTTPRQVREFLGKAGFCRLFIPGFASLAAPLYPLTRPKVPFTWTEAHQEAFGRIKEALLSAPALALPDLTKPFALYVDEKEGVARGVLTQTLGPWRRPVAYLSKKLDPVASGWPTCLKAIAAVALLLKDADKLTLGQNVLVIAPHNLESIVRQPPDRWMTNARMTHYQSLLLNERVSFAPPAILNPATLLPVESDDTPIHICSEILAEETGTRPDLRDQPLPGVPAWYTDGSSFIMDGRRQAGAAIVDNKRTVWASNLPEGTSAQKAELIALTQALRLAEGKSINIYTDSRYAFATAHVHGAIYKQRGWLTSAGKDIKNKEEILALLEAIHLPKRVAIIHCPGHQRGTDPVATGNRKADEAAKQAAQSTRILTETTKNAGKRTADGSEFEKRTADGSEFESPKKKAKVE

SEQ ID NO: 7100 - protein, 2096 aa, synthetic construct
MPAAKRVKLDGGDKKYSIGLDIGTNSVGWAVITDEYKVPSKKFKVLGNTDRHSIKKNLIGALLFDSGETAEATRLKRTARRRYTRRKNRICYLQEIFSNEMAKVDDSFFHRLEESFLVEEDKKHERHPIFGNIVDEVAYHEKYPTIYHLRKKLVDSTDKADLRLIYLALAHMIKFRGHFLIEGDLNPDNSDVDKLFIQLVQTYNQLFEENPINASGVDAKAILSARLSKSRRLENLIAQLPGEKKNGLFGNLIALSLGLTPNFKSNFDLAEDAKLQLSKDTYDDDLDNLLAQIGDQYADLFLAAKNLSDAILLSDILRVNTEITKAPLSASMIKRYDEHHQDLTLLKALVRQQLPEKYKEIFFDQSKNGYAGYIDGGASQEEFYKFIKPILEKMDGTEELLVKLNREDLLRKQRTFDNGSIPHQIHLGELHAILRRQEDFYPFLKDNREKIEKILTFRIPYYVGPLARGNSRFAWMTRKSEETITPWNFEEVVDKGASAQSFIERMTNFDKNLPNEKVLPKHSLLYEYFTVYNELTKVKYVTEGMRKPAFLSGEQKKAIVDLLFKTNRKVTVKQLKEDYFKKIECFDSVEISGVEDRFNASLGTYHDLLKIIKDKDFLDNEENEDILEDIVLTLTLFEDREMIEERLKTYAHLFDDKVMKQLKRRRYTGWGRLSRKLINGIRDKQSGKTILDFLKSDGFANRNFMQLIHDDSLTFKEDIQKAQVSGQGDSLHEHIANLAGSPAIKKGILQTVKVVDELVKVMGRHKPENIVIEMARENQTTQKGQKNSRERMKRIEEGIKELGSQILKEHPVENTQLQNEKLYLYYLQNGRDMYVDQELDINRLSDYDVDHIVPQSFLKDDSIDNKVLTRSDKARGKSDNVPSEEVVKKMKNYWRQLLNAKLITQRKFDNLTKAERGGLSELDKAGFIKRQLVETRQITKHVAQILDSRMNTKYDENDKLIREVKVITLKSKLVSDFRKDFQFYKVREINNYHHAHDAYLNAVVGTALIKKYPKLESEFVYGDYKVYDVRKMIAKSEQEIGKATAKYFFYSNIMNFFKTEITLANGEIRKRPLIETNGETGEIVWDKGRDFATVRKVLSMPQVNIVKKTEVQTGGFSKESILPKRNSDKLIARKKDWDPKKYGGFDSPTVAYSVLVVAKVEKGKSKKLKSVKELLGITIMERSSFEKNPIDFLEAKGYKEVKKDLIIKLPKYSLFELENGRKRMLASAGELQKGNELALPSKYVNFLYLASHYEKLKGSPEDNEQKQLFVEQHKHYLDEIIEQISEFSKRVILADANLDKVLSAYNKHRDKPIREQAENIIHLFTLTNLGAPAAFKYFDTTIDRKRYTSTKEVLDATLIHQSITGLYETRIDLSQLGGDGGEAAAKGGSGSSGGTLNLEDEYRLYETSAEPEVSPGSTWLSDFPQAWAETGGMGLAVRQAPLIIPLKATSTPVSIKQYPMSQEAKLGIKPHIQRLLDQGILVPCQSPWNTPLLPVKKPGTNDYRPVQDLREVNKRVEDIHPTVPNPYNLLSGLPPSHRWYTVLDLKDAFFCLRLHPTSQPLFAFEWRDPGMGISGQLTWTRLPQGFKNSPTLFNEALHRDLADFRIQHPDLILLQYVDDILLAATSELDCQQGTRALLLTLGNLGYRASAKKAQLCQKQVKYLGYLLKEGQRWLTEARKETVMGQPTPKTPRQLREFLGKAGFCRLFIPGFAEMAAPLYPLTKPGTLFNWGPDQQKAYQEIKQALLTAPALGLPDLTKPFELFVDEKQGYAKGVLTQKLGPWRRPVAYLSKKLDPVAAGWPPCLRMVAAIAVLRKDAGKLTMGQPLVILAPHAVEALVKQPPDRWLSNARMTHYQAMLLDTDRVQFGPVVALNPATLLPLPEEGAPHDCLEILAETHGTRPDLTDQPIPDADHTWYTDGSSFLQEGQRKAGAAVTTETEVIWARALPAGTSAQRAELIALTQALKMAEGKRLNVYTDSRYAFATAHIHGEIYRRRGWLTSEGREIKNKSEILALLKALFLPKRLSIIHCLGHQKGDSAEARGNRLADQAAREAAIKTPPDTSTLLAGKRTADGSEFEKRTADGSEFESPKKKAKVE

SEQ ID NO: 7101 - protein, 2096 aa, synthetic construct
MPAAKRVKLDGGDKKYSIGLDIGTNSVGWAVITDEYKVPSKKFKVLGNTDRHSIKKNLIGALLFDSGETAEATRLKRTARRRYTRRKNRICYLQEIFSNEMAKVDDSFFHRLEESFLVEEDKKHERHPIFGNIVDEVAYHEKYPTIYHLRKKLVDSTDKADLRLIYLALAHMIKFRGHFLIEGDLNPDNSDVDKLFIQLVQTYNQLFEENPINASGVDAKAILSARLSKSRRLENLIAQLPGEKKNGLFGNLIALSLGLTPNFKSNFDLAEDAKLQLSKDTYDDDLDNLLAQIGDQYADLFLAAKNLSDAILLSDILRVNTEITKAPLSASMIKRYDEHHQDLTLLKALVRQQLPEKYKEIFFDQSKNGYAGYIDGGASQEEFYKFIKPILEKMDGTEELLVKLNREDLLRKQRTFDNGSIPHQIHLGELHAILRRQEDFYPFLKDNREKIEKILTFRIPYYVGPLARGNSRFAWMTRKSEETITPWNFEEVVDKGASAQSFIERMTNFDKNLPNEKVLPKHSLLYEYFTVYNELTKVKYVTEGMRKPAFLSGEQKKAIVDLLFKTNRKVTVKQLKEDYFKKIECFDSVEISGVEDRFNASLGTYHDLLKIIKDKDFLDNEENEDILEDIVLTLTLFEDREMIEERLKTYAHLFDDKVMKQLKRRRYTGWGRLSRKLINGIRDKQSGKTILDFLKSDGFANRNFMQLIHDDSLTFKEDIQKAQVSGQGDSLHEHIANLAGSPAIKKGILQTVKVVDELVKVMGRHKPENIVIEMARENQTTQKGQKNSRERMKRIEEGIKELGSQILKEHPVENTQLQNEKLYLYYLQNGRDMYVDQELDINRLSDYDVDHIVPQSFLKDDSIDNKVLTRSDKARGKSDNVPSEEVVKKMKNYWRQLLNAKLITQRKFDNLTKAERGGLSELDKAGFIKRQLVETRQITKHVAQILDSRMNTKYDENDKLIREVKVITLKSKLVSDFRKDFQFYKVREINNYHHAHDAYLNAVVGTALIKKYPKLESEFVYGDYKVYDVRKMIAKSEQEIGKATAKYFFYSNIMNFFKTEITLANGEIRKRPLIETNGETGEIVWDKGRDFATVRKVLSMPQVNIVKKTEVQTGGFSKESILPKRNSDKLIARKKDWDPKKYGGFDSPTVAYSVLVVAKVEKGKSKKLKSVKELLGITIMERSSFEKNPIDFLEAKGYKEVKKDLIIKLPKYSLFELENGRKRMLASAGELQKGNELALPSKYVNFLYLASHYEKLKGSPEDNEQKQLFVEQHKHYLDEIIEQISEFSKRVILADANLDKVLSAYNKHRDKPIREQAENIIHLFTLTNLGAPAAFKYFDTTIDRKRYTSTKEVLDATLIHQSITGLYETRIDLSQLGGDGGEAAAKGGSGSSGGTLNIEDEYRLHETSKGPDVPLGSTWLSDFPQAWAETGGMGLAVRQAPLIIPLKATSTPVSIKQYPMSQEARLGIKPHIQRLLDQGILVPCQSPWNTPLLPVKKPGTNDYRPVQDLREVNKRVEDIHPTVPNPYNLLSGLPPSHQWYTVLDLKDAFFCLRLHPTSQSLFAFEWRDPEMGISGQLTWTRLPQGFKNSPTLFDEALHRDLADFRIQHPDLILLQYVDDLLLAATSELDCQQGTRALLQTLGDLGYRASAKKAQICQKQVKYLGYLLKEGQRWLTEARKETVMGQPTPKTPRQLREFLGTAGFCRLWIPGFAEMAAPLYPLTKTGTLFEWGPDQQKAYQEIKQALLTAPALGLPDLTKPFELFVDEKQGYAKGVLTQKLGPWRRPVAYLSKKLDPVAAGWPPCLRMVAAIAVLTKDAGKLTMGQPLVILAPHAVEALVKQPPDRWLSNARMTHYQALLLDTDRVQFGPIVALNPATLLPLPEEGLQHDCLDILAEAHGTRPDLTDQPLPDADHTWYTDGSSFLQEGQRKAGAAVTTETEVVWAKALPAGTSAQRAELIALTQALKMAEGKKLNVYTDSRYAFATAHIHGEIYRRRGLLTSEGKEIKNKDEILALLKALFLPKRLSIIHCPGHQKGNRAEARGNRMADQAAREVATRETPETSTLLAGKRTADGSEFEKRTADGSEFESPKKKAKVE

SEQ ID NO: 7102 - protein, 2087 aa, synthetic construct
MPAAKRVKLDGGDKKYSIGLDIGTNSVGWAVITDEYKVPSKKFKVLGNTDRHSIKKNLIGALLFDSGETAEATRLKRTARRRYTRRKNRICYLQEIFSNEMAKVDDSFFHRLEESFLVEEDKKHERHPIFGNIVDEVAYHEKYPTIYHLRKKLVDSTDKADLRLIYLALAHMIKFRGHFLIEGDLNPDNSDVDKLFIQLVQTYNQLFEENPINASGVDAKAILSARLSKSRRLENLIAQLPGEKKNGLFGNLIALSLGLTPNFKSNFDLAEDAKLQLSKDTYDDDLDNLLAQIGDQYADLFLAAKNLSDAILLSDILRVNTEITKAPLSASMIKRYDEHHQDLTLLKALVRQQLPEKYKEIFFDQSKNGYAGYIDGGASQEEFYKFIKPILEKMDGTEELLVKLNREDLLRKQRTFDNGSIPHQIHLGELHAILRRQEDFYPFLKDNREKIEKILTFRIPYYVGPLARGNSRFAWMTRKSEETITPWNFEEVVDKGASAQSFIERMTNFDKNLPNEKVLPKHSLLYEYFTVYNELTKVKYVTEGMRKPAFLSGEQKKAIVDLLFKTNRKVTVKQLKEDYFKKIECFDSVEISGVEDRFNASLGTYHDLLKIIKDKDFLDNEENEDILEDIVLTLTLFEDREMIEERLKTYAHLFDDKVMKQLKRRRYTGWGRLSRKLINGIRDKQSGKTILDFLKSDGFANRNFMQLIHDDSLTFKEDIQKAQVSGQGDSLHEHIANLAGSPAIKKGILQTVKVVDELVKVMGRHKPENIVIEMARENQTTQKGQKNSRERMKRIEEGIKELGSQILKEHPVENTQLQNEKLYLYYLQNGRDMYVDQELDINRLSDYDVDHIVPQSFLKDDSIDNKVLTRSDKARGKSDNVPSEEVVKKMKNYWRQLLNAKLITQRKFDNLTKAERGGLSELDKAGFIKRQLVETRQITKHVAQILDSRMNTKYDENDKLIREVKVITLKSKLVSDFRKDFQFYKVREINNYHHAHDAYLNAVVGTALIKKYPKLESEFVYGDYKVYDVRKMIAKSEQEIGKATAKYFFYSNIMNFFKTEITLANGEIRKRPLIETNGETGEIVWDKGRDFATVRKVLSMPQVNIVKKTEVQTGGFSKESILPKRNSDKLIARKKDWDPKKYGGFDSPTVAYSVLVVAKVEKGKSKKLKSVKELLGITIMERSSFEKNPIDFLEAKGYKEVKKDLIIKLPKYSLFELENGRKRMLASAGELQKGNELALPSKYVNFLYLASHYEKLKGSPEDNEQKQLFVEQHKHYLDEIIEQISEFSKRVILADANLDKVLSAYNKHRDKPIREQAENIIHLFTLTNLGAPAAFKYFDTTIDRKRYTSTKEVLDATLIHQSITGLYETRIDLSQLGGDGGEAAAKGGSGSSGGIPWLMKKPLQLTTLVPLQEYEERLLKQTMLTGSYKEKLQSLFLKYDALWQHWENQVGHRRIKPHHIATGTVNPRPQKQYPINPKAKASIQTVINDLLKQGVLIQQNSIMNTPVYPVPKPDGKWRMVLDYREVNKTIPLIAAQNQHSAGILSSIFRGKYKTTLDLSNGFWAHSITPESYWLTAFTWLGQQYCWTRLPQGFLNSPALFNADVVDLLKEVPNVQVYVDDIYISHDDPREHLEQLEKVFSLLLNAGYVVSLKKSEIAQHEVEFLGFNITKEGRGLTETFKQKLLNITPPRDLKQLQSILGLLNFARNFIPNFSELVKPLYNIIATAPGKYITWTTDNSQQLQNIISMLNSAENLEERNPEVRLIMKVNTSPSAGYIRFYNEFAKRPIMYLNYVYTKAEVKFTNTEKLLTTIHKGLIKALDLGMGQEILVYSPIVSMTKIQKTPLPERKALPIRWITWMSYLEDPRIQFHYDKTLPELQQVPTVTDDIIAKIKHPSEFSMVFYTDGSAIKHPNVNKSHNAGMGIAQVQFKPEFTVINTWSIPLGDHTAQLAEVAAVEFACKKALKIDGPVLIVTDSFYVAESVNKELPYWQSNGFFNNKKKPLKHVSKWKSIADCIQLKPDIIIIHEKGHQPTASTFHTEGNNLADKLATQGSYVVNAGKRTADGSEFEKRTADGSEFESPKKKAKVE

SEQ ID NO: 7103 - protein, 2096 aa, synthetic construct; identical to SEQ ID NO: 4523

SEQ ID NO: 7104 - protein, 2098 aa, synthetic construct
MPAAKRVKLDGGDKKYSIGLDIGTNSVGWAVITDEYKVPSKKFKVLGNTDRHSIKKNLIGALLFDSGETAEATRLKRTARRRYTRRKNRICYLQEIFSNEMAKVDDSFFHRLEESFLVEEDKKHERHPIFGNIVDEVAYHEKYPTIYHLRKKLVDSTDKADLRLIYLALAHMIKFRGHFLIEGDLNPDNSDVDKLFIQLVQTYNQLFEENPINASGVDAKAILSARLSKSRRLENLIAQLPGEKKNGLFGNLIALSLGLTPNFKSNFDLAEDAKLQLSKDTYDDDLDNLLAQIGDQYADLFLAAKNLSDAILLSDILRVNTEITKAPLSASMIKRYDEHHQDLTLLKALVRQQLPEKYKEIFFDQSKNGYAGYIDGGASQEEFYKFIKPILEKMDGTEELLVKLNREDLLRKQRTFDNGSIPHQIHLGELHAILRRQEDFYPFLKDNREKIEKILTFRIPYYVGPLARGNSRFAWMTRKSEETITPWNFEEVVDKGASAQSFIERMTNFDKNLPNEKVLPKHSLLYEYFTVYNELTKVKYVTEGMRKPAFLSGEQKKAIVDLLFKTNRKVTVKQLKEDYFKKIECFDSVEISGVEDRFNASLGTYHDLLKIIKDKDFLDNEENEDILEDIVLTLTLFEDREMIEERLKTYAHLFDDKVMKQLKRRRYTGWGRLSRKLINGIRDKQSGKTILDFLKSDGFANRNFMQLIHDDSLTFKEDIQKAQVSGQGDSLHEHIANLAGSPAIKKGILQTVKVVDELVKVMGRHKPENIVIEMARENQTTQKGQKNSRERMKRIEEGIKELGSQILKEHPVENTQLQNEKLYLYYLQNGRDMYVDQELDINRLSDYDVDHIVPQSFLKDDSIDNKVLTRSDKARGKSDNVPSEEVVKKMKNYWRQLLNAKLITQRKFDNLTKAERGGLSELDKAGFIKRQLVETRQITKHVAQILDSRMNTKYDENDKLIREVKVITLKSKLVSDFRKDFQFYKVREINNYHHAHDAYLNAVVGTALIKKYPKLESEFVYGDYKVYDVRKMIAKSEQEIGKATAKYFFYSNIMNFFKTEITLANGEIRKRPLIETNGETGEIVWDKGRDFATVRKVLSMPQVNIVKKTEVQTGGFSKESILPKRNSDKLIARKKDWDPKKYGGFDSPTVAYSVLVVAKVEKGKSKKLKSVKELLGITIMERSSFEKNPIDFLEAKGYKEVKKDLIIKLPKYSLFELENGRKRMLASAGELQKGNELALPSKYVNFLYLASHYEKLKGSPEDNEQKQLFVEQHKHYLDEIIEQISEFSKRVILADANLDKVLSAYNKHRDKPIREQAENIIHLFTLTNLGAPAAFKYFDTTIDRKRYTSTKEVLDATLIHQSITGLYETRIDLSQLGGDGGEAAAKGSSGGSGGTAPLEEEYRLFLEAPIQNVTLLEQWKREIPKVWAEINPPGLASTQAPIHVQLLSTALPVRVRQYPITLEAKRSLRETIRKFRAAGILRPVHSPWNTPLLPVRKSGTSEYRMVQDLREVNKRVETIHPTVPNPYTLLSLLPPDRIWYSVLDLKDAFFCIPLAPESQLIFAFEWADAEEGESGQLTWTRLPQGFKNSPTLFNEALNRDLQGFRLDHPSVSLLQYVDDLLIAADTQAACLSATRDLLMTLAELGYRVSGKKAQLCQEEVTYLGFKIHKGSRSLSNSRTQAILQIPVPKTKRQVREFLGTIGYCRLWIPGFAELAQPLYAATRPGNDPLVWGEKEEEAFQSLKLALTQPPALALPSLDKPFQLFVEETSGAAKGVLTQALGPWKRPVAYLSKRLDPVAAGWPRCLRAIAAAALLTREASKLTFGQDIEITSSHNLESLLRSPPDKWLTNARITQYQVLLLDPPRVRFKQTAALNPATLLPETDDTLPIHHCLDTLDSLTSTRPDLTDQPLAQAEATLFTDGSSYIRDGKRYAGAAVVTLDSVIWAEPLPIGTSAQKAELIALTKALEWSKDKSVNIYTDSRYAFATLHVHGMIYRERGWLTAGGKAIKNAPEILALLTAVWLPKRVAVMHCKGHQKDDAPTSTGNRRADEVAREVAIRPLSTQATISAGKRTADGSEFEKRTADGSEFESPKKKAKVE

SEQ ID NO: 7105 - protein, 2098 aa, synthetic construct
MPAAKRVKLDGGDKKYSIGLDIGTNSVGWAVITDEYKVPSKKFKVLGNTDRHSIKKNLIGALLFDSGETAEATRLKRTARRRYTRRKNRICYLQEIFSNEMAKVDDSFFHRLEESFLVEEDKKHERHPIFGNIVDEVAYHEKYPTIYHLRKKLVDSTDKADLRLIYLALAHMIKFRGHFLIEGDLNPDNSDVDKLFIQLVQTYNQLFEENPINASGVDAKAILSARLSKSRRLENLIAQLPGEKKNGLFGNLIALSLGLTPNFKSNFDLAEDAKLQLSKDTYDDDLDNLLAQIGDQYADLFLAAKNLSDAILLSDILRVNTEITKAPLSASMIKRYDEHHQDLTLLKALVRQQLPEKYKEIFFDQSKNGYAGYIDGGASQEEFYKFIKPILEKMDGTEELLVKLNREDLLRKQRTFDNGSIPHQIHLGELHAILRRQEDFYPFLKDNREKIEKILTFRIPYYVGPLARGNSRFAWMTRKSEETITPWNFEEVVDKGASAQSFIERMTNFDKNLPNEKVLPKHSLLYEYFTVYNELTKVKYVTEGMRKPAFLSGEQKKAIVDLLFKTNRKVTVKQLKEDYFKKIECFDSVEISGVEDRFNASLGTYHDLLKIIKDKDFLDNEENEDILEDIVLTLTLFEDREMIEERLKTYAHLFDDKVMKQLKRRRYTGWGRLSRKLINGIRDKQSGKTILDFLKSDGFANRNFMQLIHDDSLTFKEDIQKAQVSGQGDSLHEHIANLAGSPAIKKGILQTVKVVDELVKVMGRHKPENIVIEMARENQTTQKGQKNSRERMKRIEEGIKELGSQILKEHPVENTQLQNEKLYLYYLQNGRDMYVDQELDINRLSDYDVDHIVPQSFLKDDSIDNKVLTRSDKARGKSDNVPSEEVVKKMKNYWRQLLNAKLITQRKFDNLTKAERGGLSELDKAGFIKRQLVETRQITKHVAQILDSRMNTKYDENDKLIREVKVITLKSKLVSDFRKDFQFYKVREINNYHHAHDAYLNAVVGTALIKKYPKLESEFVYGDYKVYDVRKMIAKSEQEIGKATAKYFFYSNIMNFFKTEITLANGEIRKRPLIETNGETGEIVWDKGRDFATVRKVLSMPQVNIVKKTEVQTGGFSKESILPKRNSDKLIARKKDWDPKKYGGFDSPTVAYSVLVVAKVEKGKSKKLKSVKELLGITIMERSSFEKNPIDFLEAKGYKEVKKDLIIKLPKYSLFELENGRKRMLASAGELQKGNELALPSKYVNFLYLASHYEKLKGSPEDNEQKQLFVEQHKHYLDEIIEQISEFSKRVILADANLDKVLSAYNKHRDKPIREQAENIIHLFTLTNLGAPAAFKYFDTTIDRKRYTSTKEVLDATLIHQSITGLYETRIDLSQLGGDGGEAAAKGSSGGSGGTAPLEEEYRLFLEAPIQNVTLLEQWKREIPKVWAEINPPGLASTQAPIHVQLLSTALPVRVRQYPITLEAKRSLRETIRKFRAAGILRPVHSPWNTPLLPVRKSGTSEYRMVQDLREVNKRVETIHPTVPNPYTLLSLLPPDRIWYSVLDLKDAFFCIPLAPESQLIFAFEWADAEEGESGQLTWTRLPQGFKNSPTLFNEALNRDLQGFRLDHPSVSLLQYVDDLLIAADTQAACLSATRDLLMTLAELGYRVSGKKAQLCQEEVTYLGFKIHKGSRSLSNSRTQAILQIPVPKTKRQVREFLGKIGYCRLFIPGFAELAQPLYAATRPGNDPLVWGEKEEEAFQSLKLALTQPPALALPSLDKPFQLFVEETSGAAKGVLTQALGPWKRPVAYLSKRLDPVAAGWPRCLRAIAAAALLTREASKLTFGQDIEITSSHNLESLLRSPPDKWLTNARITQYQVLLLDPPRVRFKQTAALNPATLLPETDDTLPIHHCLDTLDSLTSTRPDLTDQPLAQAEATLFTDGSSYIRDGKRYAGAAVVTLDSVIWAEPLPIGTSAQKAELIALTKALEWSKDKSVNIYTDSRYAFATLHVHGMIYRERGWLTAGGKAIKNAPEILALLTAVWLPKRVAVMHCKGHQKDDAPTSTGNRRADEVAREVAIRPLSTQATISAGKRTADGSEFEKRTADGSEFESPKKKAKVE

SEQ ID NO: 7106 - protein, 2102 aa, synthetic construct
MPAAKRVKLDGGDKKYSIGLDIGTNSVGWAVITDEYKVPSKKFKVLGNTDRHSIKKNLIGALLFDSGETAEATRLKRTARRRYTRRKNRICYLQEIFSNEMAKVDDSFFHRLEESFLVEEDKKHERHPIFGNIVDEVAYHEKYPTIYHLRKKLVDSTDKADLRLIYLALAHMIKFRGHFLIEGDLNPDNSDVDKLFIQLVQTYNQLFEENPINASGVDAKAILSARLSKSRRLENLIAQLPGEKKNGLFGNLIALSLGLTPNFKSNFDLAEDAKLQLSKDTYDDDLDNLLAQIGDQYADLFLAAKNLSDAILLSDILRVNTEITKAPLSASMIKRYDEHHQDLTLLKALVRQQLPEKYKEIFFDQSKNGYAGYIDGGASQEEFYKFIKPILEKMDGTEELLVKLNREDLLRKQRTFDNGSIPHQIHLGELHAILRRQEDFYPFLKDNREKIEKILTFRIPYYVGPLARGNSRFAWMTRKSEETITPWNFEEVVDKGASAQSFIERMTNFDKNLPNEKVLPKHSLLYEYFTVYNELTKVKYVTEGMRKPAFLSGEQKKAIVDLLFKTNRKVTVKQLKEDYFKKIECFDSVEISGVEDRFNASLGTYHDLLKIIKDKDFLDNEENEDILEDIVLTLTLFEDREMIEERLKTYAHLFDDKVMKQLKRRRYTGWGRLSRKLINGIRDKQSGKTILDFLKSDGFANRNFMQLIHDDSLTFKEDIQKAQVSGQGDSLHEHIANLAGSPAIKKGILQTVKVVDELVKVMGRHKPENIVIEMARENQTTQKGQKNSRERMKRIEEGIKELGSQILKEHPVENTQLQNEKLYLYYLQNGRDMYVDQELDINRLSDYDVDHIVPQSFLKDDSIDNKVLTRSDKARGKSDNVPSEEVVKKMKNYWRQLLNAKLITQRKFDNLTKAERGGLSELDKAGFIKRQLVETRQITKHVAQILDSRMNTKYDENDKLIREVKVITLKSKLVSDFRKDFQFYKVREINNYHHAHDAYLNAVVGTALIKKYPKLESEFVYGDYKVYDVRKMIAKSEQEIGKATAKYFFYSNIMNFFKTEITLANGEIRKRPLIETNGETGEIVWDKGRDFATVRKVLSMPQVNIVKKTEVQTGGFSKESILPKRNSDKLIARKKDWDPKKYGGFDSPTVAYSVLVVAKVEKGKSKKLKSVKELLGITIMERSSFEKNPIDFLEAKGYKEVKKDLIIKLPKYSLFELENGRKRMLASAGELQKGNELALPSKYVNFLYLASHYEKLKGSPEDNEQKQLFVEQHKHYLDEIIEQISEFSKRVILADANLDKVLSAYNKHRDKPIREQAENIIHLFTLTNLGAPAAFKYFDTTIDRKRYTSTKEVLDATLIHQSITGLYETRIDLSQLGGDGGEAAAKGSSGGSGGTVSLQDEHRLFDIPVTTSLPDVWLQDFPQAWAETGGLGRAKCQAPIIIDLKPTAVPVSIKQYPMSLEAHMGIRQHIIKFLELGVLRPCRSPWNTPLLPVKKPGTQDYRPVQDLREINKRTVDIHPTVPNPYNLLSTLKPDYSWYTVLDLKDAFFCLPLAPQSQELFAFEWKDPERGISGQLTWTRLPQGFKNSPTLFNEALHRDLTDFRTQHPEVTLLQYVDDLLLAAPTKKACTQGTRHLLQELGEKGYRASAKKAQICQTKVTYLGYILSEGKRWLTPGRIETVARIPPPRNPREVREFLGKAGFCRLFIPGFAELAAPLYALTKPSTPFTWQTEHQLAFEALKKALLSAPALGLPDTSKPFTLFLDERQGIAKGVLTQKLGPWKRPVAYLSKKLDPVAAGWPPCLRIMAATAMLVKDSAKLTLGQPLTVITPHTLEAIVRQPPDRWITNARLTHYQALLLDTDRVQFGPPVTLNPATLLPVPENQPSPHDCRQVLAETHGTREDLKDQELPDADHTWYTDGSSYLDSGTRRAGAAVVDGHNTIWAQSLPPGTSAQKAELIALTKALELSKGKKANIYTDSRYAFATAHTHGSIYERRGWLTSEGKEIKNKAEIIALLKALFLPQEVAIIHCPGHQKGQDPVAVGNRQADRVARQAAMAEVLTLATEPDNTSHITAGKRTADGSEFEKRTADGSEFESPKKKAKVE

SEQ ID NO: 7107 - protein, 2087 aa, synthetic construct
MPAAKRVKLDGGDKKYSIGLDIGTNSVGWAVITDEYKVPSKKFKVLGNTDRHSIKKNLIGALLFDSGETAEATRLKRTARRRYTRRKNRICYLQEIFSNEMAKVDDSFFHRLEESFLVEEDKKHERHPIFGNIVDEVAYHEKYPTIYHLRKKLVDSTDKADLRLIYLALAHMIKFRGHFLIEGDLNPDNSDVDKLFIQLVQTYNQLFEENPINASGVDAKAILSARLSKSRRLENLIAQLPGEKKNGLFGNLIALSLGLTPNFKSNFDLAEDAKLQLSKDTYDDDLDNLLAQIGDQYADLFLAAKNLSDAILLSDILRVNTEITKAPLSASMIKRYDEHHQDLTLLKALVRQQLPEKYKEIFFDQSKNGYAGYIDGGASQEEFYKFIKPILEKMDGTEELLVKLNREDLLRKQRTFDNGSIPHQIHLGELHAILRRQEDFYPFLKDNREKIEKILTFRIPYYVGPLARGNSRFAWMTRKSEETITPWNFEEVVDKGASAQSFIERMTNFDKNLPNEKVLPKHSLLYEYFTVYNELTKVKYVTEGMRKPAFLSGEQKKAIVDLLFKTNRKVTVKQLKEDYFKKIECFDSVEISGVEDRFNASLGTYHDLLKIIKDKDFLDNEENEDILEDIVLTLTLFEDREMIEERLKTYAHLFDDKVMKQLKRRRYTGWGRLSRKLINGIRDKQSGKTILDFLKSDGFANRNFMQLIHDDSLTFKEDIQKAQVSGQGDSLHEHIANLAGSPAIKKGILQTVKVVDELVKVMGRHKPENIVIEMARENQTTQKGQKNSRERMKRIEEGIKELGSQILKEHPVENTQLQNEKLYLYYLQNGRDMYVDQELDINRLSDYDVDHIVPQSFLKDDSIDNKVLTRSDKARGKSDNVPSEEVVKKMKNYWRQLLNAKLITQRKFDNLTKAERGGLSELDKAGFIKRQLVETRQITKHVAQILDSRMNTKYDENDKLIREVKVITLKSKLVSDFRKDFQFYKVREINNYHHAHDAYLNAVVGTALIKKYPKLESEFVYGDYKVYDVRKMIAKSEQEIGKATAKYFFYSNIMNFFKTEITLANGEIRKRPLIETNGETGEIVWDKGRDFATVRKVLSMPQVNIVKKTEVQTGGFSKESILPKRNSDKLIARKKDWDPKKYGGFDSPTVAYSVLVVAKVEKGKSKKLKSVKELLGITIMERSSFEKNPIDFLEAKGYKEVKKDLIIKLPKYSLFELENGRKRMLASAGELQKGNELALPSKYVNFLYLASHYEKLKGSPEDNEQKQLFVEQHKHYLDEIIEQISEFSKRVILADANLDKVLSAYNKHRDKPIREQAENIIHLFTLTNLGAPAAFKYFDTTIDRKRYTSTKEVLDATLIHQSITGLYETRIDLSQLGGDGGEAAAKGSSGGSGGVPWILKKPLELTIKLDLEEQQGTLLNNSILSKKGKEELKQLFEKYSALWQSWENQVGHRRIRPHKIATGTVKPTPQKQYHINPKAKPDIQIVINDLLKQGVLIQKESTMNTPVYPVPKPNGRWRMVLDYRAVNKVTPLIAVQNQHSYGILGSLFKGRYKTTIDLSNGFWAHPIVPEDYWITAFTWQGKQYCWTVLPQGFLNSPGLFTGDVVDLLQGIPNVEVYVDDVYISHDSEKEHLEYLDILFNRLKEAGYIISLKKSNIANSIVDFLGFQITNEGRGLTDTFKEKLENITAPTTLKQLQSILGLLNFARNFIPDFTELIAPLYALIPKSTKNYVPWQIEHSTTLETLITKLNGAEYLQGRKGDKTLIMKVNASYTTGYIRYYNEGEKKPISYVSIVFSKTELKFTELEKLLTTVHKGLLKALDLSMGQNIHVYSPIVSMQNIQKTPQTAKKALASRWLSWLSYLEDPRIRFFYDPQMPALKDLPAVDTGKDNKKHPSNFQHIFYTDGSAITSPTKEGHLNAGMGIVYFINKDGNLQKQQEWSISLGNHTAQFAEIAAFEFALKKCLPLGGNILVVTDSNYVAKAYNEELDVWASNGFVNNRKKPLKHISKWKSVADLKRLRPDVVVTHEPGHQKLDSSPHAYGNNLADQLATQASFKVHAGKRTADGSEFEKRTADGSEFESPKKKAKVE

SEQ ID NO: 7108 - protein, 2087 aa, synthetic construct
MPAAKRVKLDGGDKKYSIGLDIGTNSVGWAVITDEYKVPSKKFKVLGNTDRHSIKKNLIGALLFDSGETAEATRLKRTARRRYTRRKNRICYLQEIFSNEMAKVDDSFFHRLEESFLVEEDKKHERHPIFGNIVDEVAYHEKYPTIYHLRKKLVDSTDKADLRLIYLALAHMIKFRGHFLIEGDLNPDNSDVDKLFIQLVQTYNQLFEENPINASGVDAKAILSARLSKSRRLENLIAQLPGEKKNGLFGNLIALSLGLTPNFKSNFDLAEDAKLQLSKDTYDDDLDNLLAQIGDQYADLFLAAKNLSDAILLSDILRVNTEITKAPLSASMIKRYDEHHQDLTLLKALVRQQLPEKYKEIFFDQSKNGYAGYIDGGASQEEFYKFIKPILEKMDGTEELLVKLNREDLLRKQRTFDNGSIPHQIHLGELHAILRRQEDFYPFLKDNREKIEKILTFRIPYYVGPLARGNSRFAWMTRKSEETITPWNFEEVVDKGASAQSFIERMTNFDKNLPNEKVLPKHSLLYEYFTVYNELTKVKYVTEGMRKPAFLSGEQKKAIVDLLFKTNRKVTVKQLKEDYFKKIECFDSVEISGVEDRFNASLGTYHDLLKIIKDKDFLDNEENEDILEDIVLTLTLFEDREMIEERLKTYAHLFDDKVMKQLKRRRYTGWGRLSRKLINGIRDKQSGKTILDFLKSDGFANRNFMQLIHDDSLTFKEDIQKAQVSGQGDSLHEHIANLAGSPAIKKGILQTVKVVDELVKVMGRHKPENIVIEMARENQTTQKGQKNSRERMKRIEEGIKELGSQILKEHPVENTQLQNEKLYLYYLQNGRDMYVDQELDINRLSDYDVDHIVPQSFLKDDSIDNKVLTRSDKARGKSDNVPSEEVVKKMKNYWRQLLNAKLITQRKFDNLTKAERGGLSELDKAGFIKRQLVETRQITKHVAQILDSRMNTKYDENDKLIREVKVITLKSKLVSDFRKDFQFYKVREINNYHHAHDAYLNAVVGTALIKKYPKLESEFVYGDYKVYDVRKMIAKSEQEIGKATAKYFFYSNIMNFFKTEITLANGEIRKRPLIETNGETGEIVWDKGRDFATVRKVLSMPQVNIVKKTEVQTGGFSKESILPKRNSDKLIARKKDWDPKKYGGFDSPTVAYSVLVVAKVEKGKSKKLKSVKELLGITIMERSSFEKNPIDFLEAKGYKEVKKDLIIKLPKYSLFELENGRKRMLASAGELQKGNELALPSKYVNFLYLASHYEKLKGSPEDNEQKQLFVEQHKHYLDEIIEQISEFSKRVILADANLDKVLSAYNKHRDKPIREQAENIIHLFTLTNLGAPAAFKYFDTTIDRKRYTSTKEVLDATLIHQSITGLYETRIDLSQLGGDGGEAAAKGSSGGSGGVPWILKKPLELTIKLDLEEQQGTLLNNSILSKKGKEELKQLFEKYSALWQSWENQVGHRRIRPHKIATGTVKPTPQKQYHINPKAKPDIQIVINDLLKQGVLIQKESTMNTPVYPVPKPNGRWRMVLDYRAVNKVTPLIAVQNQHSYGILGSLFKGRYKTTIDLSNGFWAHPIVPEDYWITAFTWQGKQYCWTVLPQGFLNSPGLFNGDVVDLLQGIPNVEVYVDDVYISHDSEKEHLEYLDILFNRLKEAGYIISLKKSNIANSIVDFLGFQITNEGRGLTDTFKEKLENITAPTTLKQLQSILGKLNFARNFIPDFTELIAPLYALIPKSPKNYVPWQIEHSTTLETLITKLNGAEYLQGRKGDKTLIMKVNASYTTGYIRYYNEGEKKPISYVSIVFSKTELKFTELEKLLTTVHKGLLKALDLSMGQNIHVYSPIVSMQNIQKTPQTAKKALASRWLSWLSYLEDPRIRFFYDPQMPALKDLPAVDTGKDNKKHPSNFQHIFYTDGSAITSPTKEGHLNAGMGIVYFINKDGNLQKQQEWSISLGNHTAQFAEIAAFEFALKKCLPLGGNILVVTDSNYVAKAYNEELDVWASNGFVNNRKKPLKHISKWKSVADLKRLRPDVVVTHEPGHQKLDSSPHAYGNNLADQLATQASFKVHAGKRTADGSEFEKRTADGSEFESPKKKAKVE

SEQ ID NO: 7109 - protein, 2094 aa, synthetic construct
MPAAKRVKLDGGDKKYSIGLDIGTNSVGWAVITDEYKVPSKKFKVLGNTDRHSIKKNLIGALLFDSGETAEATRLKRTARRRYTRRKNRICYLQEIFSNEMAKVDDSFFHRLEESFLVEEDKKHERHPIFGNIVDEVAYHEKYPTIYHLRKKLVDSTDKADLRLIYLALAHMIKFRGHFLIEGDLNPDNSDVDKLFIQLVQTYNQLFEENPINASGVDAKAILSARLSKSRRLENLIAQLPGEKKNGLFGNLIALSLGLTPNFKSNFDLAEDAKLQLSKDTYDDDLDNLLAQIGDQYADLFLAAKNLSDAILLSDILRVNTEITKAPLSASMIKRYDEHHQDLTLLKALVRQQLPEKYKEIFFDQSKNGYAGYIDGGASQEEFYKFIKPILEKMDGTEELLVKLNREDLLRKQRTFDNGSIPHQIHLGELHAILRRQEDFYPFLKDNREKIEKILTFRIPYYVGPLARGNSRFAWMTRKSEETITPWNFEEVVDKGASAQSFIERMTNFDKNLPNEKVLPKHSLLYEYFTVYNELTKVKYVTEGMRKPAFLSGEQKKAIVDLLFKTNRKVTVKQLKEDYFKKIECFDSVEISGVEDRFNASLGTYHDLLKIIKDKDFLDNEENEDILEDIVLTLTLFEDREMIEERLKTYAHLFDDKVMKQLKRRRYTGWGRLSRKLINGIRDKQSGKTILDFLKSDGFANRNFMQLIHDDSLTFKEDIQKAQVSGQGDSLHEHIANLAGSPAIKKGILQTVKVVDELVKVMGRHKPENIVIEMARENQTTQKGQKNSRERMKRIEEGIKELGSQILKEHPVENTQLQNEKLYLYYLQNGRDMYVDQELDINRLSDYDVDHIVPQSFLKDDSIDNKVLTRSDKARGKSDNVPSEEVVKKMKNYWRQLLNAKLITQRKFDNLTKAERGGLSELDKAGFIKRQLVETRQITKHVAQILDSRMNTKYDENDKLIREVKVITLKSKLVSDFRKDFQFYKVREINNYHHAHDAYLNAVVGTALIKKYPKLESEFVYGDYKVYDVRKMIAKSEQEIGKATAKYFFYSNIMNFFKTEITLANGEIRKRPLIETNGETGEIVWDKGRDFATVRKVLSMPQVNIVKKTEVQTGGFSKESILPKRNSDKLIARKKDWDPKKYGGFDSPTVAYSVLVVAKVEKGKSKKLKSVKELLGITIMERSSFEKNPIDFLEAKGYKEVKKDLIIKLPKYSLFELENGRKRMLASAGELQKGNELALPSKYVNFLYLASHYEKLKGSPEDNEQKQLFVEQHKHYLDEIIEQISEFSKRVILADANLDKVLSAYNKHRDKPIREQAENIIHLFTLTNLGAPAAFKYFDTTIDRKRYTSTKEVLDATLIHQSITGLYETRIDLSQLGGDGGEAAAKGSSGGSGGVLNLEEEYRLHEKPVPSSIDPSWLQLFPTVWAERAGMGLANQVPPVVVELRSGASPVAVRQYPMSKEAREGIRPHIQKFLDLGVLVPCRSPWNTPLLPVKKPGTNDYRPVQDLREINKRVQDIHPTVPNPYNLLSSLPPSYTWYSVLDLKDAFFCLRLHPNSQPLFAFEWKDPEKGNTGQLTWTRLPQGFKNSPTLFNEALHRDLAPFRALNPQVVLLQYVDDLLVAAPTYEDCKKGTQKLLQELSKLGYRVSAKKAQLCQREVTYLGYLLKEGKRWLTPARKATVMKIPVPTTPRQVREFLGTAGFCRLWIPGFASLAAPLYPLTKPSIPFIWTEEHQQAFDHIKKALLSAPALALPDLTKPFTLYIDERAGVARGVLTQTLGPWRRPVAYLSKKLDPVASGWPTCLKAVAAVALLLKDADKLTLGQNVTVIASHSLESIVRQPPDRWMTNARMTHYQSLLLNERVSFAPPAVLNPATLLPVESEATPVHRCSEILAEETGTRRDLEDQPLPGVPTWYTDGSSFITEGKRRAGAPIVDGKRTVWASSLPEGTSAQKAELVALTQALRLAEGKNINIYTDSRYAFATAHIHGAIYKQRGWLTSAGKDIKNKEEILALLEAIHLPRRVAIIHCPGHQRGSNPVATGNRRADEAAKQAALSTRVLAGTTKPAGKRTADGSEFEKRTADGSEFESPKKKAKVE

SEQ ID NO: 7110 - protein, 2127 aa, synthetic construct
MPAAKRVKLDGGDKKYSIGLDIGTNSVGWAVITDEYKVPSKKFKVLGNTDRHSIKKNLIGALLFDSGETAEATRLKRTARRRYTRRKNRICYLQEIFSNEMAKVDDSFFHRLEESFLVEEDKKHERHPIFGNIVDEVAYHEKYPTIYHLRKKLVDSTDKADLRLIYLALAHMIKFRGHFLIEGDLNPDNSDVDKLFIQLVQTYNQLFEENPINASGVDAKAILSARLSKSRRLENLIAQLPGEKKNGLFGNLIALSLGLTPNFKSNFDLAEDAKLQLSKDTYDDDLDNLLAQIGDQYADLFLAAKNLSDAILLSDILRVNTEITKAPLSASMIKRYDEHHQDLTLLKALVRQQLPEKYKEIFFDQSKNGYAGYIDGGASQEEFYKFIKPILEKMDGTEELLVKLNREDLLRKQRTFDNGSIPHQIHLGELHAILRRQEDFYPFLKDNREKIEKILTFRIPYYVGPLARGNSRFAWMTRKSEETITPWNFEEVVDKGASAQSFIERMTNFDKNLPNEKVLPKHSLLYEYFTVYNELTKVKYVTEGMRKPAFLSGEQKKAIVDLLFKTNRKVTVKQLKEDYFKKIECFDSVEISGVEDRFNASLGTYHDLLKIIKDKDFLDNEENEDILEDIVLTLTLFEDREMIEERLKTYAHLFDDKVMKQLKRRRYTGWGRLSRKLINGIRDKQSGKTILDFLKSDGFANRNFMQLIHDDSLTFKEDIQKAQVSGQGDSLHEHIANLAGSPAIKKGILQTVKVVDELVKVMGRHKPENIVIEMARENQTTQKGQKNSRERMKRIEEGIKELGSQILKEHPVENTQLQNEKLYLYYLQNGRDMYVDQELDINRLSDYDVDHIVPQSFLKDDSIDNKVLTRSDKARGKSDNVPSEEVVKKMKNYWRQLLNAKLITQRKFDNLTKAERGGLSELDKAGFIKRQLVETRQITKHVAQILDSRMNTKYDENDKLIREVKVITLKSKLVSDFRKDFQFYKVREINNYHHAHDAYLNAVVGTALIKKYPKLESEFVYGDYKVYDVRKMIAKSEQEIGKATAKYFFYSNIMNFFKTEITLANGEIRKRPLIETNGETGEIVWDKGRDFATVRKVLSMPQVNIVKKTEVQTGGFSKESILPKRNSDKLIARKKDWDPKKYGGFDSPTVAYSVLVVAKVEKGKSKKLKSVKELLGITIMERSSFEKNPIDFLEAKGYKEVKKDLIIKLPKYSLFELENGRKRMLASAGELQKGNELALPSKYVNFLYLASHYEKLKGSPEDNEQKQLFVEQHKHYLDEIIEQISEFSKRVILADANLDKVLSAYNKHRDKPIREQAENIIHLFTLTNLGAPAAFKYFDTTIDRKRYTSTKEVLDATLIHQSITGLYETRIDLSQLGGDGGEAAAKGSSGGSGGLLGRDLLTKLKAQIQFSTEGPQVTWEDRPAMCLVLNLEEEYRLHEKPVPPSIDPSWLQLFPMVWAEKAGMGLANQVPPVVVELKSDASPVAVRQYPMSKEAREGIRPHIQRFLDLGILVPCQSPWNTPLLPVKKPGTNDYRPVQDLREVNKRVQDIHPTVPNPYNLLSSLPPSHTWYSVLDLKDAFFCLKLHPNSQPLFAFEWRDPEKGNTGQLTWTRLPQGFKNSPTLFNEALHRDLASFRALNPQVVMLQYVDDLLVAAPTYRDCKEGTRRLLQELSKLGYRVSAKKAQLCREEVTYLGYLLKGGKRWLTPARKATVMKIPTPTTPRQVREFLGTAGFCRLWIPGFASLAAPLYPLTRPKVPFTWTEAHQEAFGRIKEALLSAPALALPDLTKPFALYVDEKEGVARGVLTQTLGPWRRPVAYLSKKLDPVASGWPTCLKAIAAVALLLKDADKLTLGQNVLVIAPHNLESIVRQPPDRWMTNARMTHYQSLLLNERVSFAPPAILNPATLLPVESDDTPIHICSEILAEETGTRPDLRDQPLPGVPAWYTDGSSFIMDGRRQAGAAIVDNKRTVWASNLPEGTSAQKAELIALTQALRLAEGKSINIYTDSRYAFATAHVHGAIYKQRGWLTSAGKDIKNKEEILALLEAIHLPKRVAIIHCPGHQRGTDPVATGNRKADEAAKQAAQSTRILTETTKNAGKRTADGSEFEKRTADGSEFESPKKKAKVE

SEQ ID NO: 7111 - protein, 2218 aa, synthetic construct
MPAAKRVKLDGGDKKYSIGLDIGTNSVGWAVITDEYKVPSKKFKVLGNTDRHSIKKNLIGALLFDSGETAEATRLKRTARRRYTRRKNRICYLQEIFSNEMAKVDDSFFHRLEESFLVEEDKKHERHPIFGNIVDEVAYHEKYPTIYHLRKKLVDSTDKADLRLIYLALAHMIKFRGHFLIEGDLNPDNSDVDKLFIQLVQTYNQLFEENPINASGVDAKAILSARLSKSRRLENLIAQLPGEKKNGLFGNLIALSLGLTPNFKSNFDLAEDAKLQLSKDTYDDDLDNLLAQIGDQYADLFLAAKNLSDAILLSDILRVNTEITKAPLSASMIKRYDEHHQDLTLLKALVRQQLPEKYKEIFFDQSKNGYAGYIDGGASQEEFYKFIKPILEKMDGTEELLVKLNREDLLRKQRTFDNGSIPHQIHLGELHAILRRQEDFYPFLKDNREKIEKILTFRIPYYVGPLARGNSRFAWMTRKSEETITPWNFEEVVDKGASAQSFIERMTNFDKNLPNEKVLPKHSLLYEYFTVYNELTKVKYVTEGMRKPAFLSGEQKKAIVDLLFKTNRKVTVKQLKEDYFKKIECFDSVEISGVEDRFNASLGTYHDLLKIIKDKDFLDNEENEDILEDIVLTLTLFEDREMIEERLKTYAHLFDDKVMKQLKRRRYTGWGRLSRKLINGIRDKQSGKTILDFLKSDGFANRNFMQLIHDDSLTFKEDIQKAQVSGQGDSLHEHIANLAGSPAIKKGILQTVKVVDELVKVMGRHKPENIVIEMARENQTTQKGQKNSRERMKRIEEGIKELGSQILKEHPVENTQLQNEKLYLYYLQNGRDMYVDQELDINRLSDYDVDHIVPQSFLKDDSIDNKVLTRSDKARGKSDNVPSEEVVKKMKNYWRQLLNAKLITQRKFDNLTKAERGGLSELDKAGFIKRQLVETRQITKHVAQILDSRMNTKYDENDKLIREVKVITLKSKLVSDFRKDFQFYKVREINNYHHAHDAYLNAVVGTALIKKYPKLESEFVYGDYKVYDVRKMIAKSEQEIGKATAKYFFYSNIMNFFKTEITLANGEIRKRPLIETNGETGEIVWDKGRDFATVRKVLSMPQVNIVKKTEVQTGGFSKESILPKRNSDKLIARKKDWDPKKYGGFDSPTVAYSVLVVAKVEKGKSKKLKSVKELLGITIMERSSFEKNPIDFLEAKGYKEVKKDLIIKLPKYSLFELENGRKRMLASAGELQKGNELALPSKYVNFLYLASHYEKLKGSPEDNEQKQLFVEQHKHYLDEIIEQISEFSKRVILADANLDKVLSAYNKHRDKPIREQAENIIHLFTLTNLGAPAAFKYFDTTIDRKRYTSTKEVLDATLIHQSITGLYETRIDLSQLGGDGGEAAAKGSSGGSGGTLGDQGSRGSDPLPEPRVTLTVEGIPTEFLVNTGAEHSVLTKPMGKMGSKRTVVAGATGSKVYPWTTKRLLKIGQKQVTHSFLVIPECPAPLLGRDLLTKLKAQIQFSTEGPQVTWEDRPAMCLVLNLEEEYRLHEKPVPPSIDPSWLQLFPMVWAEKAGMGLANQVPPVVVELKSDASPVAVRQYPMSKEAREGIRPHIQRFLDLGILVPCQSPWNTPLLPVKKPGTNDYRPVQDLREVNKRVQDIHPTVPNPYNLLSSLPPSHTWYSVLDLKDAFFCLKLHPNSQPLFAFEWRDPEKGNTGQLTWTRLPQGFKNSPTLFNEALHRDLASFRALNPQVVMLQYVDDLLVAAPTYRDCKEGTRRLLQELSKLGYRVSAKKAQLCREEVTYLGYLLKGGKRWLTPARKATVMKIPTPTTPRQVREFLGTAGFCRLWIPGFASLAAPLYPLTRPKVPFTWTEAHQEAFGRIKEALLSAPALALPDLTKPFALYVDEKEGVARGVLTQTLGPWRRPVAYLSKKLDPVASGWPTCLKAIAAVALLLKDADKLTLGQNVLVIAPHNLESIVRQPPDRWMTNARMTHYQSLLLNERVSFAPPAILNPATLLPVESDDTPIHICSEILAEETGTRPDLRDQPLPGVPAWYTDGSSFIMDGRRQAGAAIVDNKRTVWASNLPEGTSAQKAELIALTQALRLAEGKSINIYTDSRYAFATAHVHGAIYKQRGWLTSAGKDIKNKEEILALLEAIHLPKRVAIIHCPGHQRGTDPVATGNRKADEAAKQAAQSTRILTETTKNAGKRTADGSEFEKRTADGSEFESPKKKAKVE

SEQ ID NO: 7112 - protein, 2218 aa, synthetic construct
MPAAKRVKLDGGDKKYSIGLDIGTNSVGWAVITDEYKVPSKKFKVLGNTDRHSIKKNLIGALLFDSGETAEATRLKRTARRRYTRRKNRICYLQEIFSNEMAKVDDSFFHRLEESFLVEEDKKHERHPIFGNIVDEVAYHEKYPTIYHLRKKLVDSTDKADLRLIYLALAHMIKFRGHFLIEGDLNPDNSDVDKLFIQLVQTYNQLFEENPINASGVDAKAILSARLSKSRRLENLIAQLPGEKKNGLFGNLIALSLGLTPNFKSNFDLAEDAKLQLSKDTYDDDLDNLLAQIGDQYADLFLAAKNLSDAILLSDILRVNTEITKAPLSASMIKRYDEHHQDLTLLKALVRQQLPEKYKEIFFDQSKNGYAGYIDGGASQEEFYKFIKPILEKMDGTEELLVKLNREDLLRKQRTFDNGSIPHQIHLGELHAILRRQEDFYPFLKDNREKIEKILTFRIPYYVGPLARGNSRFAWMTRKSEETITPWNFEEVVDKGASAQSFIERMTNFDKNLPNEKVLPKHSLLYEYFTVYNELTKVKYVTEGMRKPAFLSGEQKKAIVDLLFKTNRKVTVKQLKEDYFKKIECFDSVEISGVEDRFNASLGTYHDLLKIIKDKDFLDNEENEDILEDIVLTLTLFEDREMIEERLKTYAHLFDDKVMKQLKRRRYTGWGRLSRKLINGIRDKQSGKTILDFLKSDGFANRNFMQLIHDDSLTFKEDIQKAQVSGQGDSLHEHIANLAGSPAIKKGILQTVKVVDELVKVMGRHKPENIVIEMARENQTTQKGQKNSRERMKRIEEGIKELGSQILKEHPVENTQLQNEKLYLYYLQNGRDMYVDQELDINRLSDYDVDHIVPQSFLKDDSIDNKVLTRSDKARGKSDNVPSEEVVKKMKNYWRQLLNAKLITQRKFDNLTKAERGGLSELDKAGFIKRQLVETRQITKHVAQILDSRMNTKYDENDKLIREVKVITLKSKLVSDFRKDFQFYKVREINNYHHAHDAYLNAVVGTALIKKYPKLESEFVYGDYKVYDVRKMIAKSEQEIGKATAKYFFYSNIMNFFKTEITLANGEIRKRPLIETNGETGEIVWDKGRDFATVRKVLSMPQVNIVKKTEVQTGGFSKESILPKRNSDKLIARKKDWDPKKYGGFDSPTVAYSVLVVAKVEKGKSKKLKSVKELLGITIMERSSFEKNPIDFLEAKGYKEVKKDLIIKLPKYSLFELENGRKRMLASAGELQKGNELALPSKYVNFLYLASHYEKLKGSPEDNEQKQLFVEQHKHYLDEIIEQISEFSKRVILADANLDKVLSAYNKHRDKPIREQAENIIHLFTLTNLGAPAAFKYFDTTIDRKRYTSTKEVLDATLIHQSITGLYETRIDLSQLGGDGGEAAAKGSSGGSGGTLGDQGSRGSDPLPEPRVTLTVEGIPTEFLVNTGAEHSVLTKPMGKMGSKRTVVAGATGSKVYPWTTKRLLKIGQKQVTHSFLVIPECPAPLLGRDLLTKLKAQIQFSTEGPQVTWEDRPAMCLVLNLEEEYRLHEKPVPPSIDPSWLQLFPMVWAEKAGMGLANQVPPVVVELKSDASPVAVRQYPMSKEAREGIRPHIQRFLDLGILVPCQSPWNTPLLPVKKPGTNDYRPVQDLREVNKRVQDIHPTVPNPYNLLSSLPPSHTWYSVLDLKDAFFCLKLHPNSQPLFAFEWRDPEKGNTGQLTWTRLPQGFKNSPTLFNEALHRDLASFRALNPQVVMLQYVDDLLVAAPTYRDCKEGTRRLLQELSKLGYRVSAKKAQLCREEVTYLGYLLKGGKRWLTPARKATVMKIPTPTTPRQVREFLGKAGFCRLFIPGFASLAAPLYPLTRPKVPFTWTEAHQEAFGRIKEALLSAPALALPDLTKPFALYVDEKEGVARGVLTQTLGPWRRPVAYLSKKLDPVASGWPTCLKAIAAVALLLKDADKLTLGQNVLVIAPHNLESIVRQPPDRWMTNARMTHYQSLLLNERVSFAPPAILNPATLLPVESDDTPIHICSEILAEETGTRPDLRDQPLPGVPAWYTDGSSFIMDGRRQAGAAIVDNKRTVWASNLPEGTSAQKAELIALTQALRLAEGKSINIYTDSRYAFATAHVHGAIYKQRGWLTSAGKDIKNKEEILALLEAIHLPKRVAIIHCPGHQRGTDPVATGNRKADEAAKQAAQSTRILTETTKNAGKRTADGSEFEKRTADGSEFESPKKKAKVE

SEQ ID NO: 7113 - protein, 2096 aa, synthetic construct
MPAAKRVKLDGGDKKYSIGLDIGTNSVGWAVITDEYKVPSKKFKVLGNTDRHSIKKNLIGALLFDSGETAEATRLKRTARRRYTRRKNRICYLQEIFSNEMAKVDDSFFHRLEESFLVEEDKKHERHPIFGNIVDEVAYHEKYPTIYHLRKKLVDSTDKADLRLIYLALAHMIKFRGHFLIEGDLNPDNSDVDKLFIQLVQTYNQLFEENPINASGVDAKAILSARLSKSRRLENLIAQLPGEKKNGLFGNLIALSLGLTPNFKSNFDLAEDAKLQLSKDTYDDDLDNLLAQIGDQYADLFLAAKNLSDAILLSDILRVNTEITKAPLSASMIKRYDEHHQDLTLLKALVRQQLPEKYKEIFFDQSKNGYAGYIDGGASQEEFYKFIKPILEKMDGTEELLVKLNREDLLRKQRTFDNGSIPHQIHLGELHAILRRQEDFYPFLKDNREKIEKILTFRIPYYVGPLARGNSRFAWMTRKSEETITPWNFEEVVDKGASAQSFIERMTNFDKNLPNEKVLPKHSLLYEYFTVYNELTKVKYVTEGMRKPAFLSGEQKKAIVDLLFKTNRKVTVKQLKEDYFKKIECFDSVEISGVEDRFNASLGTYHDLLKIIKDKDFLDNEENEDILEDIVLTLTLFEDREMIEERLKTYAHLFDDKVMKQLKRRRYTGWGRLSRKLINGIRDKQSGKTILDFLKSDGFANRNFMQLIHDDSLTFKEDIQKAQVSGQGDSLHEHIANLAGSPAIKKGILQTVKVVDELVKVMGRHKPENIVIEMARENQTTQKGQKNSRERMKRIEEGIKELGSQILKEHPVENTQLQNEKLYLYYLQNGRDMYVDQELDINRLSDYDVDHIVPQSFLKDDSIDNKVLTRSDKARGKSDNVPSEEVVKKMKNYWRQLLNAKLITQRKFDNLTKAERGGLSELDKAGFIKRQLVETRQITKHVAQILDSRMNTKYDENDKLIREVKVITLKSKLVSDFRKDFQFYKVREINNYHHAHDAYLNAVVGTALIKKYPKLESEFVYGDYKVYDVRKMIAKSEQEIGKATAKYFFYSNIMNFFKTEITLANGEIRKRPLIETNGETGEIVWDKGRDFATVRKVLSMPQVNIVKKTEVQTGGFSKESILPKRNSDKLIARKKDWDPKKYGGFDSPTVAYSVLVVAKVEKGKSKKLKSVKELLGITIMERSSFEKNPIDFLEAKGYKEVKKDLIIKLPKYSLFELENGRKRMLASAGELQKGNELALPSKYVNFLYLASHYEKLKGSPEDNEQKQLFVEQHKHYLDEIIEQISEFSKRVILADANLDKVLSAYNKHRDKPIREQAENIIHLFTLTNLGAPAAFKYFDTTIDRKRYTSTKEVLDATLIHQSITGLYETRIDLSQLGGDGGEAAAKGSSGGSGGTLNLEDEYRLYETSAEPEVSPGSTWLSDFPQAWAETGGMGLAVRQAPLIIPLKATSTPVSIKQYPMSQEAKLGIKPHIQRLLDQGILVPCQSPWNTPLLPVKKPGTNDYRPVQDLREVNKRVEDIHPTVPNPYNLLSGLPPSHRWYTVLDLKDAFFCLRLHPTSQPLFAFEWRDPGMGISGQLTWTRLPQGFKNSPTLFNEALHRDLADFRIQHPDLILLQYVDDILLAATSELDCQQGTRALLLTLGNLGYRASAKKAQLCQKQVKYLGYLLKEGQRWLTEARKETVMGQPTPKTPRQLREFLGTAGFCRLWIPGFAEMAAPLYPLTKPGTLFNWGPDQQKAYQEIKQALLTAPALGLPDLTKPFELFVDEKQGYAKGVLTQKLGPWRRPVAYLSKKLDPVAAGWPPCLRMVAAIAVLRKDAGKLTMGQPLVILAPHAVEALVKQPPDRWLSNARMTHYQAMLLDTDRVQFGPVVALNPATLLPLPEEGAPHDCLEILAETHGTRPDLTDQPIPDADHTWYTDGSSFLQEGQRKAGAAVTTETEVIWARALPAGTSAQRAELIALTQALKMAEGKRLNVYTDSRYAFATAHIHGEIYRRRGWLTSEGREIKNKSEILALLKALFLPKRLSIIHCLGHQKGDSAEARGNRLADQAAREAAIKTPPDTSTLLAGKRTADGSEFEKRTADGSEFESPKKKAKVE

SEQ ID NO: 7114 - protein, 2096 aa, synthetic construct
MPAAKRVKLDGGDKKYSIGLDIGTNSVGWAVITDEYKVPSKKFKVLGNTDRHSIKKNLIGALLFDSGETAEATRLKRTARRRYTRRKNRICYLQEIFSNEMAKVDDSFFHRLEESFLVEEDKKHERHPIFGNIVDEVAYHEKYPTIYHLRKKLVDSTDKADLRLIYLALAHMIKFRGHFLIEGDLNPDNSDVDKLFIQLVQTYNQLFEENPINASGVDAKAILSARLSKSRRLENLIAQLPGEKKNGLFGNLIALSLGLTPNFKSNFDLAEDAKLQLSKDTYDDDLDNLLAQIGDQYADLFLAAKNLSDAILLSDILRVNTEITKAPLSASMIKRYDEHHQDLTLLKALVRQQLPEKYKEIFFDQSKNGYAGYIDGGASQEEFYKFIKPILEKMDGTEELLVKLNREDLLRKQRTFDNGSIPHQIHLGELHAILRRQEDFYPFLKDNREKIEKILTFRIPYYVGPLARGNSRFAWMTRKSEETITPWNFEEVVDKGASAQSFIERMTNFDKNLPNEKVLPKHSLLYEYFTVYNELTKVKYVTEGMRKPAFLSGEQKKAIVDLLFKTNRKVTVKQLKEDYFKKIECFDSVEISGVEDRFNASLGTYHDLLKIIKDKDFLDNEENEDILEDIVLTLTLFEDREMIEERLKTYAHLFDDKVMKQLKRRRYTGWGRLSRKLINGIRDKQSGKTILDFLKSDGFANRNFMQLIHDDSLTFKEDIQKAQVSGQGDSLHEHIANLAGSPAIKKGILQTVKVVDELVKVMGRHKPENIVIEMARENQTTQKGQKNSRERMKRIEEGIKELGSQILKEHPVENTQLQNEKLYLYYLQNGRDMYVDQELDINRLSDYDVDHIVPQSFLKDDSIDNKVLTRSDKARGKSDNVPSEEVVKKMKNYWRQLLNAKLITQRKFDNLTKAERGGLSELDKAGFIKRQLVETRQITKHVAQILDSRMNTKYDENDKLIREVKVITLKSKLVSDFRKDFQFYKVREINNYHHAHDAYLNAVVGTALIKKYPKLESEFVYGDYKVYDVRKMIAKSEQEIGKATAKYFFYSNIMNFFKTEITLANGEIRKRPLIETNGETGEIVWDKGRDFATVRKVLSMPQVNIVKKTEVQTGGFSKESILPKRNSDKLIARKKDWDPKKYGGFDSPTVAYSVLVVAKVEKGKSKKLKSVKELLGITIMERSSFEKNPIDFLEAKGYKEVKKDLIIKLPKYSLFELENGRKRMLASAGELQKGNELALPSKYVNFLYLASHYEKLKGSPEDNEQKQLFVEQHKHYLDEIIEQISEFSKRVILADANLDKVLSAYNKHRDKPIREQAENIIHLFTLTNLGAPAAFKYFDTTIDRKRYTSTKEVLDATLIHQSITGLYETRIDLSQLGGDGGEAAAKGSSGGSGGTLNIEDEYRLHETSKGPDVPLGSTWLSDFPQAWAETGGMGLAVRQAPLIIPLKATSTPVSIKQYPMSQEARLGIKPHIQRLLDQGILVPCQSPWNTPLLPVKKPGTNDYRPVQDLREVNKRVEDIHPTVPNPYNLLSGLPPSHQWYTVLDLKDAFFCLRLHPTSQSLFAFEWRDPEMGISGQLTWTRLPQGFKNSPTLFDEALHRDLADFRIQHPDLILLQYVDDLLLAATSELDCQQGTRALLQTLGDLGYRASAKKAQICQKQVKYLGYLLKEGQRWLTEARKETVMGQPTPKTPRQLREFLGTAGFCRLWIPGFAEMAAPLYPLTKTGTLFEWGPDQQKAYQEIKQALLTAPALGLPDLTKPFELFVDEKQGYAKGVLTQKLGPWRRPVAYLSKKLDPVAAGWPPCLRMVAAIAVLTKDAGKLTMGQPLVILAPHAVEALVKQPPDRWLSNARMTHYQALLLDTDRVQFGPIVALNPATLLPLPEEGLQHDCLDILAEAHGTRPDLTDQPLPDADHTWYTDGSSFLQEGQRKAGAAVTTETEVVWAKALPAGTSAQRAELIALTQALKMAEGKKLNVYTDSRYAFATAHIHGEIYRRRGLLTSEGKEIKNKDEILALLKALFLPKRLSIIHCPGHQKGNRAEARGNRMADQAAREVATRETPETSTLLAGKRTADGSEFEKRTADGSEFESPKKKAKVE

SEQ ID NO: 7115 - protein, 2096 aa, synthetic construct
MPAAKRVKLDGGDKKYSIGLDIGTNSVGWAVITDEYKVPSKKFKVLGNTDRHSIKKNLIGALLFDSGETAEATRLKRTARRRYTRRKNRICYLQEIFSNEMAKVDDSFFHRLEESFLVEEDKKHERHPIFGNIVDEVAYHEKYPTIYHLRKKLVDSTDKADLRLIYLALAHMIKFRGHFLIEGDLNPDNSDVDKLFIQLVQTYNQLFEENPINASGVDAKAILSARLSKSRRLENLIAQLPGEKKNGLFGNLIALSLGLTPNFKSNFDLAEDAKLQLSKDTYDDDLDNLLAQIGDQYADLFLAAKNLSDAILLSDILRVNTEITKAPLSASMIKRYDEHHQDLTLLKALVRQQLPEKYKEIFFDQSKNGYAGYIDGGASQEEFYKFIKPILEKMDGTEELLVKLNREDLLRKQRTFDNGSIPHQIHLGELHAILRRQEDFYPFLKDNREKIEKILTFRIPYYVGPLARGNSRFAWMTRKSEETITPWNFEEVVDKGASAQSFIERMTNFDKNLPNEKVLPKHSLLYEYFTVYNELTKVKYVTEGMRKPAFLSGEQKKAIVDLLFKTNRKVTVKQLKEDYFKKIECFDSVEISGVEDRFNASLGTYHDLLKIIKDKDFLDNEENEDILEDIVLTLTLFEDREMIEERLKTYAHLFDDKVMKQLKRRRYTGWGRLSRKLINGIRDKQSGKTILDFLKSDGFANRNFMQLIHDDSLTFKEDIQKAQVSGQGDSLHEHIANLAGSPAIKKGILQTVKVVDELVKVMGRHKPENIVIEMARENQTTQKGQKNSRERMKRIEEGIKELGSQILKEHPVENTQLQNEKLYLYYLQNGRDMYVDQELDINRLSDYDVDHIVPQSFLKDDSIDNKVLTRSDKARGKSDNVPSEEVVKKMKNYWRQLLNAKLITQRKFDNLTKAERGGLSELDKAGFIKRQLVETRQITKHVAQILDSRMNTKYDENDKLIREVKVITLKSKLVSDFRKDFQFYKVREINNYHHAHDAYLNAVVGTALIKKYPKLESEFVYGDYKVYDVRKMIAKSEQEIGKATAKYFFYSNIMNFFKTEITLANGEIRKRPLIETNGETGEIVWDKGRDFATVRKVLSMPQVNIVKKTEVQTGGFSKESILPKRNSDKLIARKKDWDPKKYGGFDSPTVAYSVLVVAKVEKGKSKKLKSVKELLGITIMERSSFEKNPIDFLEAKGYKEVKKDLIIKLPKYSLFELENGRKRMLASAGELQKGNELALPSKYVNFLYLASHYEKLKGSPEDNEQKQLFVEQHKHYLDEIIEQISEFSKRVILADANLDKVLSAYNKHRDKPIREQAENIIHLFTLTNLGAPAAFKYFDTTIDRKRYTSTKEVLDATLIHQSITGLYETRIDLSQLGGDGGEAAAKGSSGGSGGTLNIEDEYRLHETSKGPDVPLGSTWLSDFPQAWAETGGMGLAVRQAPLIIPLKATSTPVSIKQYPMSQEARLGIKPHIQRLLDQGILVPCQSPWNTPLLPVKKPGTNDYRPVQDLREVNKRVEDIHPTVPNPYNLLSGLPPSHQWYTVLDLKDAFFCLRLHPTSQSLFAFEWRDPEMGISGQLTWTRLPQGFKNSPTLFNEALHRDLADFRIQHPDLILLQYVDDLLLAATSELDCQQGTRALLQTLGDLGYRASAKKAQICQKQVKYLGYLLKEGQRWLTEARKETVMGQPTPKTPRQLREFLGKAGFCRLFIPGFAEMAAPLYPLTKPGTLFEWGPDQQKAYQEIKQALLTAPALGLPDLTKPFELFVDEKQGYAKGVLTQKLGPWRRPVAYLSKKLDPVAAGWPPCLRMVAAIAVLTKDAGKLTMGQPLVILAPHAVEALVKQPPDRWLSNARMTHYQALLLDTDRVQFGPIVALNPATLLPLPEEGLQHDCLDILAEAHGTRPDLTDQPLPDADHTWYTDGSSFLQEGQRKAGAAVTTETEVVWAKALPAGTSAQRAELIALTQALKMAEGKKLNVYTDSRYAFATAHIHGEIYRRRGWLTSEGKEIKNKDEILALLKALFLPKRLSIIHCPGHQKGNRAEARGNRMADQAAREVATRETPETSTLLAGKRTADGSEFEKRTADGSEFESPKKKAKVE

SEQ ID NO: 7116 - protein, 2096 aa, synthetic construct
MPAAKRVKLDGGDKKYSIGLDIGTNSVGWAVITDEYKVPSKKFKVLGNTDRHSIKKNLIGALLFDSGETAEATRLKRTARRRYTRRKNRICYLQEIFSNEMAKVDDSFFHRLEESFLVEEDKKHERHPIFGNIVDEVAYHEKYPTIYHLRKKLVDSTDKADLRLIYLALAHMIKFRGHFLIEGDLNPDNSDVDKLFIQLVQTYNQLFEENPINASGVDAKAILSARLSKSRRLENLIAQLPGEKKNGLFGNLIALSLGLTPNFKSNFDLAEDAKLQLSKDTYDDDLDNLLAQIGDQYADLFLAAKNLSDAILLSDILRVNTEITKAPLSASMIKRYDEHHQDLTLLKALVRQQLPEKYKEIFFDQSKNGYAGYIDGGASQEEFYKFIKPILEKMDGTEELLVKLNREDLLRKQRTFDNGSIPHQIHLGELHAILRRQEDFYPFLKDNREKIEKILTFRIPYYVGPLARGNSRFAWMTRKSEETITPWNFEEVVDKGASAQSFIERMTNFDKNLPNEKVLPKHSLLYEYFTVYNELTKVKYVTEGMRKPAFLSGEQKKAIVDLLFKTNRKVTVKQLKEDYFKKIECFDSVEISGVEDRFNASLGTYHDLLKIIKDKDFLDNEENEDILEDIVLTLTLFEDREMIEERLKTYAHLFDDKVMKQLKRRRYTGWGRLSRKLINGIRDKQSGKTILDFLKSDGFANRNFMQLIHDDSLTFKEDIQKAQVSGQGDSLHEHIANLAGSPAIKKGILQTVKVVDELVKVMGRHKPENIVIEMARENQTTQKGQKNSRERMKRIEEGIKELGSQILKEHPVENTQLQNEKLYLYYLQNGRDMYVDQELDINRLSDYDVDHIVPQSFLKDDSIDNKVLTRSDKARGKSDNVPSEEVVKKMKNYWRQLLNAKLITQRKFDNLTKAERGGLSELDKAGFIKRQLVETRQITKHVAQILDSRMNTKYDENDKLIREVKVITLKSKLVSDFRKDFQFYKVREINNYHHAHDAYLNAVVGTALIKKYPKLESEFVYGDYKVYDVRKMIAKSEQEIGKATAKYFFYSNIMNFFKTEITLANGEIRKRPLIETNGETGEIVWDKGRDFATVRKVLSMPQVNIVKKTEVQTGGFSKESILPKRNSDKLIARKKDWDPKKYGGFDSPTVAYSVLVVAKVEKGKSKKLKSVKELLGITIMERSSFEKNPIDFLEAKGYKEVKKDLIIKLPKYSLFELENGRKRMLASAGELQKGNELALPSKYVNFLYLASHYEKLKGSPEDNEQKQLFVEQHKHYLDEIIEQISEFSKRVILADANLDKVLSAYNKHRDKPIREQAENIIHLFTLTNLGAPAAFKYFDTTIDRKRYTSTKEVLDATLIHQSITGLYETRIDLSQLGGDGGEAAAKGSSGGSGGTLNIEDEHRLHETSKEPDVSLGSTWLSDFPQAWAETGGMGLAVRQAPLIIPLKATSTPVSIKQYPMSQEARLGIKPHIQRLLDQGILVPCQSPWNTPLLPVKKPGTNDYRPVQDLREVNKRVEDIHPTVPNPYNLLSGLPPSHQWYTVLDLKDAFFCLRLHPTSQPLFAFEWRDPEMGISGQLTWTRLPQGFKNSPTLFDEALHRDLADFRIQHPDLILLQYVDDLLLAATSELDCQQGTRALLQTLGNLGYRASAKKAQICQKQVKYLGYLLKEGQRWLTEARKETVMGQPTPKTPRQLREFLGTAGFCRLWIPGFAEMAAPLYPLTKTGTLFNWGPDQQKAYQEIKQALLTAPALGLPDLTKPFELFVDEKQGYAKGVLTQKLGPWRRPVAYLSKKLDPVAAGWPPCLRMVAAIAVLTKDAGKLTMGQPLVILAPHAVEALVKQPPDRWLSNARMTHYQALLLDTDRVQFGPVVALNPATLLPLPEEGLQHNCLDILAEAHGTRPDLTDQPLPDADHTWYTDGSSLLQEGQRKAGAAVTTETEVIWAKALPAGTSAQRAELIALTQALKMAEGKKLNVYTDSRYAFATAHIHGEIYRRRGLLTSEGKEIKNKDEILALLKALFLPKRLSIIHCPGHQKGHSAEARGNRMADQAARKAAITETPDTSTLLAGKRTADGSEFEKRTADGSEFESPKKKAKVE

SEQ ID NO: 7117 - protein, 2090 aa, synthetic construct
MPAAKRVKLDGGDKKYSIGLDIGTNSVGWAVITDEYKVPSKKFKVLGNTDRHSIKKNLIGALLFDSGETAEATRLKRTARRRYTRRKNRICYLQEIFSNEMAKVDDSFFHRLEESFLVEEDKKHERHPIFGNIVDEVAYHEKYPTIYHLRKKLVDSTDKADLRLIYLALAHMIKFRGHFLIEGDLNPDNSDVDKLFIQLVQTYNQLFEENPINASGVDAKAILSARLSKSRRLENLIAQLPGEKKNGLFGNLIALSLGLTPNFKSNFDLAEDAKLQLSKDTYDDDLDNLLAQIGDQYADLFLAAKNLSDAILLSDILRVNTEITKAPLSASMIKRYDEHHQDLTLLKALVRQQLPEKYKEIFFDQSKNGYAGYIDGGASQEEFYKFIKPILEKMDGTEELLVKLNREDLLRKQRTFDNGSIPHQIHLGELHAILRRQEDFYPFLKDNREKIEKILTFRIPYYVGPLARGNSRFAWMTRKSEETITPWNFEEVVDKGASAQSFIERMTNFDKNLPNEKVLPKHSLLYEYFTVYNELTKVKYVTEGMRKPAFLSGEQKKAIVDLLFKTNRKVTVKQLKEDYFKKIECFDSVEISGVEDRFNASLGTYHDLLKIIKDKDFLDNEENEDILEDIVLTLTLFEDREMIEERLKTYAHLFDDKVMKQLKRRRYTGWGRLSRKLINGIRDKQSGKTILDFLKSDGFANRNFMQLIHDDSLTFKEDIQKAQVSGQGDSLHEHIANLAGSPAIKKGILQTVKVVDELVKVMGRHKPENIVIEMARENQTTQKGQKNSRERMKRIEEGIKELGSQILKEHPVENTQLQNEKLYLYYLQNGRDMYVDQELDINRLSDYDVDHIVPQSFLKDDSIDNKVLTRSDKARGKSDNVPSEEVVKKMKNYWRQLLNAKLITQRKFDNLTKAERGGLSELDKAGFIKRQLVETRQITKHVAQILDSRMNTKYDENDKLIREVKVITLKSKLVSDFRKDFQFYKVREINNYHHAHDAYLNAVVGTALIKKYPKLESEFVYGDYKVYDVRKMIAKSEQEIGKATAKYFFYSNIMNFFKTEITLANGEIRKRPLIETNGETGEIVWDKGRDFATVRKVLSMPQVNIVKKTEVQTGGFSKESILPKRNSDKLIARKKDWDPKKYGGFDSPTVAYSVLVVAKVEKGKSKKLKSVKELLGITIMERSSFEKNPIDFLEAKGYKEVKKDLIIKLPKYSLFELENGRKRMLASAGELQKGNELALPSKYVNFLYLASHYEKLKGSPEDNEQKQLFVEQHKHYLDEIIEQISEFSKRVILADANLDKVLSAYNKHRDKPIREQAENIIHLFTLTNLGAPAAFKYFDTTIDRKRYTSTKEVLDATLIHQSITGLYETRIDLSQLGGDGGEAAAKGSSGGSGGTLQLDDEYRLYSPLVKPDQNIQFWLEQFPQAWAETAGMGLAKQVPPQVIQLKASATPVSVRQYPLSKEAQEGIRPHVQRLIQQGILVPVQSPWNTPLLPVRKPGTNDYRPVQDLREVNKRVQDIHPTVPNPYNLLCALPPQRSWYTVLDLKDAFFCLRLHPTSQPLFAFEWRDPGTGRTGQLTWTRLPQGFKNSPTIFDEALHRDLANFRIQHPQVTLLQYVDDLLLAGATKQDCLEGTKALLLELSDLGYRASAKKAQICRREVTYLGYSLRDGQRWLTEARKKTVVQIPAPTTAKQVREFLGTAGFCRLWIPGFATLAAPLYPLTKEKGEFSWAPEHQKAFDAIKKALLSAPALALPDVTKPFTLYVDERKGVARGVLTQTLGPWRRPVAYLSKKLDPVASGWPVCLKAIAAVAILVKDADKLTLGQNITVIAPHALENIVRQPPDRWMTNARMTHYQSLLLTERVTFAPPAALNPATLLPEETDEPVTHDCHQLLIEETGVRKDLTDIPLTGEVLTWFTDGSSYVVEGKRMAGAAVVDGTRTIWASSLPEGTSAQKAELMALTQALRLAEGKSINIYTDSRYAFATAHVHGAIYKQRGLLTSAGREIKNKEEILSLLEALHLPKRLAIIHCPGHQKAKDPISRGNQMADRVAKQAAQGVNLLAGKRTADGSEFEKRTADGSEFESPKKKAKVE

SEQ ID NO: 7118 - protein, 2176 aa, synthetic construct
MPAAKRVKLDGGDKKYSIGLDIGTNSVGWAVITDEYKVPSKKFKVLGNTDRHSIKKNLIGALLFDSGETAEATRLKRTARRRYTRRKNRICYLQEIFSNEMAKVDDSFFHRLEESFLVEEDKKHERHPIFGNIVDEVAYHEKYPTIYHLRKKLVDSTDKADLRLIYLALAHMIKFRGHFLIEGDLNPDNSDVDKLFIQLVQTYNQLFEENPINASGVDAKAILSARLSKSRRLENLIAQLPGEKKNGLFGNLIALSLGLTPNFKSNFDLAEDAKLQLSKDTYDDDLDNLLAQIGDQYADLFLAAKNLSDAILLSDILRVNTEITKAPLSASMIKRYDEHHQDLTLLKALVRQQLPEKYKEIFFDQSKNGYAGYIDGGASQEEFYKFIKPILEKMDGTEELLVKLNREDLLRKQRTFDNGSIPHQIHLGELHAILRRQEDFYPFLKDNREKIEKILTFRIPYYVGPLARGNSRFAWMTRKSEETITPWNFEEVVDKGASAQSFIERMTNFDKNLPNEKVLPKHSLLYEYFTVYNELTKVKYVTEGMRKPAFLSGEQKKAIVDLLFKTNRKVTVKQLKEDYFKKIECFDSVEISGVEDRFNASLGTYHDLLKIIKDKDFLDNEENEDILEDIVLTLTLFEDREMIEERLKTYAHLFDDKVMKQLKRRRYTGWGRLSRKLINGIRDKQSGKTILDFLKSDGFANRNFMQLIHDDSLTFKEDIQKAQVSGQGDSLHEHIANLAGSPAIKKGILQTVKVVDELVKVMGRHKPENIVIEMARENQTTQKGQKNSRERMKRIEEGIKELGSQILKEHPVENTQLQNEKLYLYYLQNGRDMYVDQELDINRLSDYDVDHIVPQSFLKDDSIDNKVLTRSDKARGKSDNVPSEEVVKKMKNYWRQLLNAKLITQRKFDNLTKAERGGLSELDKAGFIKRQLVETRQITKHVAQILDSRMNTKYDENDKLIREVKVITLKSKLVSDFRKDFQFYKVREINNYHHAHDAYLNAVVGTALIKKYPKLESEFVYGDYKVYDVRKMIAKSEQEIGKATAKYFFYSNIMNFFKTEITLANGEIRKRPLIETNGETGEIVWDKGRDFATVRKVLSMPQVNIVKKTEVQTGGFSKESILPKRNSDKLIARKKDWDPKKYGGFDSPTVAYSVLVVAKVEKGKSKKLKSVKELLGITIMERSSFEKNPIDFLEAKGYKEVKKDLIIKLPKYSLFELENGRKRMLASAGELQKGNELALPSKYVNFLYLASHYEKLKGSPEDNEQKQLFVEQHKHYLDEIIEQISEFSKRVILADANLDKVLSAYNKHRDKPIREQAENIIHLFTLTNLGAPAAFKYFDTTIDRKRYTSTKEVLDATLIHQSITGLYETRIDLSQLGGDGGEAAAKGSSGGSGGMDPLQLLQPLEAEIKGTKLKAHWNSGATITCVPQAFLEEEVPIKNIWIKTIHGEKEQPVYYLTFKIQGRKVEAEVISSPYDYILVSPSDIPWLMKKPLQLTTLVPLQEYEERLLKQTMLTGSYKEKLQSLFLKYDALWQHWENQVGHRRIKPHHIATGTVNPRPQKQYPINPKAKASIQTVINDLLKQGVLIQQNSIMNTPVYPVPKPDGKWRMVLDYREVNKTIPLIAAQNQHSAGILSSIFRGKYKTTLDLSNGFWAHSITPESYWLTAFTWLGQQYCWTRLPQGFLNSPALFNADVVDLLKEVPNVQVYVDDIYISHDDPREHLEQLEKVFSLLLNAGYVVSLKKSEIAQHEVEFLGFNITKEGRGLTETFKQKLLNITPPRDLKQLQSILGLLNFARNFIPNFSELVKPLYNIIATAPGKYITWTTDNSQQLQNIISMLNSAENLEERNPEVRLIMKVNTSPSAGYIRFYNEFAKRPIMYLNYVYTKAEVKFTNTEKLLTTIHKGLIKALDLGMGQEILVYSPIVSMTKIQKTPLPERKALPIRWITWMSYLEDPRIQFHYDKTLPELQQVPTVTDDIIAKIKHPSEFSMVFYTDGSAIKHPNVNKSHNAGMGIAQVQFKPEFTVINTWSIPLGDHTAQLAEVAAVEFACKKALKIDGPVLIVTDSFYVAESVNKELPYWQSNGFFNNKKKPLKHVSKWKSIADCIQLKPDIIIIHEKGHQPTASTFHTEGNNLADKLATQGSYVVNAGKRTADGSEFEKRTADGSEFESPKKKAKVE

SEQ ID NO: 7119 - protein, 2094 aa, synthetic construct
MPAAKRVKLDGGDKKYSIGLDIGTNSVGWAVITDEYKVPSKKFKVLGNTDRHSIKKNLIGALLFDSGETAEATRLKRTARRRYTRRKNRICYLQEIFSNEMAKVDDSFFHRLEESFLVEEDKKHERHPIFGNIVDEVAYHEKYPTIYHLRKKLVDSTDKADLRLIYLALAHMIKFRGHFLIEGDLNPDNSDVDKLFIQLVQTYNQLFEENPINASGVDAKAILSARLSKSRRLENLIAQLPGEKKNGLFGNLIALSLGLTPNFKSNFDLAEDAKLQLSKDTYDDDLDNLLAQIGDQYADLFLAAKNLSDAILLSDILRVNTEITKAPLSASMIKRYDEHHQDLTLLKALVRQQLPEKYKEIFFDQSKNGYAGYIDGGASQEEFYKFIKPILEKMDGTEELLVKLNREDLLRKQRTFDNGSIPHQIHLGELHAILRRQEDFYPFLKDNREKIEKILTFRIPYYVGPLARGNSRFAWMTRKSEETITPWNFEEVVDKGASAQSFIERMTNFDKNLPNEKVLPKHSLLYEYFTVYNELTKVKYVTEGMRKPAFLSGEQKKAIVDLLFKTNRKVTVKQLKEDYFKKIECFDSVEISGVEDRFNASLGTYHDLLKIIKDKDFLDNEENEDILEDIVLTLTLFEDREMIEERLKTYAHLFDDKVMKQLKRRRYTGWGRLSRKLINGIRDKQSGKTILDFLKSDGFANRNFMQLIHDDSLTFKEDIQKAQVSGQGDSLHEHIANLAGSPAIKKGILQTVKVVDELVKVMGRHKPENIVIEMARENQTTQKGQKNSRERMKRIEEGIKELGSQILKEHPVENTQLQNEKLYLYYLQNGRDMYVDQELDINRLSDYDVDHIVPQSFLKDDSIDNKVLTRSDKARGKSDNVPSEEVVKKMKNYWRQLLNAKLITQRKFDNLTKAERGGLSELDKAGFIKRQLVETRQITKHVAQILDSRMNTKYDENDKLIREVKVITLKSKLVSDFRKDFQFYKVREINNYHHAHDAYLNAVVGTALIKKYPKLESEFVYGDYKVYDVRKMIAKSEQEIGKATAKYFFYSNIMNFFKTEITLANGEIRKRPLIETNGETGEIVWDKGRDFATVRKVLSMPQVNIVKKTEVQTGGFSKESILPKRNSDKLIARKKDWDPKKYGGFDSPTVAYSVLVVAKVEKGKSKKLKSVKELLGITIMERSSFEKNPIDFLEAKGYKEVKKDLIIKLPKYSLFELENGRKRMLASAGELQKGNELALPSKYVNFLYLASHYEKLKGSPEDNEQKQLFVEQHKHYLDEIIEQISEFSKRVILADANLDKVLSAYNKHRDKPIREQAENIIHLFTLTNLGAPAAFKYFDTTIDRKRYTSTKEVLDATLIHQSITGLYETRIDLSQLGGDGGEAAAKGSSGGSGGVLNLEEEYRLHEKPVPSSIDPSWLQLFPTVWAERAGMGLANQVPPVVVELRSGASPVAVRQYPMSKEAREGIRPHIQRFLDLGVLVPCQSPWNTPLLPVKKPGTNDYRPVQDLREINKRVQDIHPTVPNPYNLLSSLPPSHTWYSVLDLKDAFFCLKLHPNSQPLFAFEWRDPEKGNTGQLTWTRLPQGFKNSPTLFDEALHRDLAPFRALNPQVVLLQYVDDLLVAAPTYRDCKEGTQKLLQELSKLGYRVSAKKAQLCQKEVTYLGYLLKEGKRWLTPARKATVMKIPPPTTPRQVREFLGTAGFCRLWIPGFASLAAPLYPLTKESIPFIWTEEHQKAFDRIKEALLSAPALALPDLTKPFTLYVDERAGVARGVLTQTLGPWRRPVAYLSKKLDPVASGWPTCLKAVAAVALLLKDADKLTLGQNVTVIASHSLESIVRQPPDRWMTNARMTHYQSLLLNERVSFAPPAVLNPATLLPVESEATPVHRCSEILAEETGTRRDLKDQPLPGVPAWYTDGSSFIAEGKRRAGAAIVDGKRTVWASSLPEGTSAQKAELVALTQALRLAEGKDINIYTDSRYAFATAHIHGAIYKQRGLLTSAGKDIKNKEEILALLEAIHLPKRVAIIHCPGHQKGNDPVATGNRRADEAAKQAALSTRVLAETTKPAGKRTADGSEFEKRTADGSEFESPKKKAKVE

SEQ ID NO: 7120 - protein, 2094 aa, synthetic construct
MPAAKRVKLDGGDKKYSIGLDIGTNSVGWAVITDEYKVPSKKFKVLGNTDRHSIKKNLIGALLFDSGETAEATRLKRTARRRYTRRKNRICYLQEIFSNEMAKVDDSFFHRLEESFLVEEDKKHERHPIFGNIVDEVAYHEKYPTIYHLRKKLVDSTDKADLRLIYLALAHMIKFRGHFLIEGDLNPDNSDVDKLFIQLVQTYNQLFEENPINASGVDAKAILSARLSKSRRLENLIAQLPGEKKNGLFGNLIALSLGLTPNFKSNFDLAEDAKLQLSKDTYDDDLDNLLAQIGDQYADLFLAAKNLSDAILLSDILRVNTEITKAPLSASMIKRYDEHHQDLTLLKALVRQQLPEKYKEIFFDQSKNGYAGYIDGGASQEEFYKFIKPILEKMDGTEELLVKLNREDLLRKQRTFDNGSIPHQIHLGELHAILRRQEDFYPFLKDNREKIEKILTFRIPYYVGPLARGNSRFAWMTRKSEETITPWNFEEVVDKGASAQSFIERMTNFDKNLPNEKVLPKHSLLYEYFTVYNELTKVKYVTEGMRKPAFLSGEQKKAIVDLLFKTNRKVTVKQLKEDYFKKIECFDSVEISGVEDRFNASLGTYHDLLKIIKDKDFLDNEENEDILEDIVLTLTLFEDREMIEERLKTYAHLFDDKVMKQLKRRRYTGWGRLSRKLINGIRDKQSGKTILDFLKSDGFANRNFMQLIHDDSLTFKEDIQKAQVSGQGDSLHEHIANLAGSPAIKKGILQTVKVVDELVKVMGRHKPENIVIEMARENQTTQKGQKNSRERMKRIEEGIKELGSQILKEHPVENTQLQNEKLYLYYLQNGRDMYVDQELDINRLSDYDVDHIVPQSFLKDDSIDNKVLTRSDKARGKSDNVPSEEVVKKMKNYWRQLLNAKLITQRKFDNLTKAERGGLSELDKAGFIKRQLVETRQITKHVAQILDSRMNTKYDENDKLIREVKVITLKSKLVSDFRKDFQFYKVREINNYHHAHDAYLNAVVGTALIKKYPKLESEFVYGDYKVYDVRKMIAKSEQEIGKATAKYFFYSNIMNFFKTEITLANGEIRKRPLIETNGETGEIVWDKGRDFATVRKVLSMPQVNIVKKTEVQTGGFSKESILPKRNSDKLIARKKDWDPKKYGGFDSPTVAYSVLVVAKVEKGKSKKLKSVKELLGITIMERSSFEKNPIDFLEAKGYKEVKKDLIIKLPKYSLFELENGRKRMLASAGELQKGNELALPSKYVNFLYLASHYEKLKGSPEDNEQKQLFVEQHKHYLDEIIEQISEFSKRVILADANLDKVLSAYNKHRDKPIREQAENIIHLFTLTNLGAPAAFKYFDTTIDRKRYTSTKEVLDATLIHQSITGLYETRIDLSQLGGDGGEAAAKGSSGGSGGVLNLEEEYRLHEKPVPSSIDPSWLQLFPTVWAERAGMGLANQVPPVVVELRSGASPVAVRQYPMSKEAREGIRPHIQRFLDLGVLVPCQSPWNTPLLPVKKPGTNDYRPVQDLREINKRVQDIHPTVPNPYNLLSSLPPSHTWYSVLDLKDAFFCLKLHPNSQPLFAFEWRDPEKGNTGQLTWTRLPQGFKNSPTLFNEALHRDLAPFRALNPQVVLLQYVDDLLVAAPTYRDCKEGTQKLLQELSKLGYRVSAKKAQLCQKEVTYLGYLLKEGKRWLTPARKATVMKIPPPTTPRQVREFLGTAGFCRLWIPGFASLAAPLYPLTKPSIPFIWTEEHQKAFDRIKEALLSAPALALPDLTKPFTLYVDERAGVARGVLTQTLGPWRRPVAYLSKKLDPVASGWPTCLKAVAAVALLLKDADKLTLGQNVTVIASHSLESIVRQPPDRWMTNARMTHYQSLLLNERVSFAPPAVLNPATLLPVESEATPVHRCSEILAEETGTRRDLKDQPLPGVPAWYTDGSSFIAEGKRRAGAAIVDGKRTVWASSLPEGTSAQKAELVALTQALRLAEGKDINIYTDSRYAFATAHIHGAIYKQRGWLTSAGKDIKNKEEILALLEAIHLPKRVAIIHCPGHQKGNDPVATGNRRADEAAKQAALSTRVLAETTKPAGKRTADGSEFEKRTADGSEFESPKKKAKVE

SEQ ID NO: 7121 - protein, 2096 aa, synthetic construct; identical to SEQ ID NO: 4524

SEQ ID NO: 7122 - protein, 2096 aa, synthetic construct
MPAAKRVKLDGGDKKYSIGLDIGTNSVGWAVITDEYKVPSKKFKVLGNTDRHSIKKNLIGALLFDSGETAEATRLKRTARRRYTRRKNRICYLQEIFSNEMAKVDDSFFHRLEESFLVEEDKKHERHPIFGNIVDEVAYHEKYPTIYHLRKKLVDSTDKADLRLIYLALAHMIKFRGHFLIEGDLNPDNSDVDKLFIQLVQTYNQLFEENPINASGVDAKAILSARLSKSRRLENLIAQLPGEKKNGLFGNLIALSLGLTPNFKSNFDLAEDAKLQLSKDTYDDDLDNLLAQIGDQYADLFLAAKNLSDAILLSDILRVNTEITKAPLSASMIKRYDEHHQDLTLLKALVRQQLPEKYKEIFFDQSKNGYAGYIDGGASQEEFYKFIKPILEKMDGTEELLVKLNREDLLRKQRTFDNGSIPHQIHLGELHAILRRQEDFYPFLKDNREKIEKILTFRIPYYVGPLARGNSRFAWMTRKSEETITPWNFEEVVDKGASAQSFIERMTNFDKNLPNEKVLPKHSLLYEYFTVYNELTKVKYVTEGMRKPAFLSGEQKKAIVDLLFKTNRKVTVKQLKEDYFKKIECFDSVEISGVEDRFNASLGTYHDLLKIIKDKDFLDNEENEDILEDIVLTLTLFEDREMIEERLKTYAHLFDDKVMKQLKRRRYTGWGRLSRKLINGIRDKQSGKTILDFLKSDGFANRNFMQLIHDDSLTFKEDIQKAQVSGQGDSLHEHIANLAGSPAIKKGILQTVKVVDELVKVMGRHKPENIVIEMARENQTTQKGQKNSRERMKRIEEGIKELGSQILKEHPVENTQLQNEKLYLYYLQNGRDMYVDQELDINRLSDYDVDHIVPQSFLKDDSIDNKVLTRSDKARGKSDNVPSEEVVKKMKNYWRQLLNAKLITQRKFDNLTKAERGGLSELDKAGFIKRQLVETRQITKHVAQILDSRMNTKYDENDKLIREVKVITLKSKLVSDFRKDFQFYKVREINNYHHAHDAYLNAVVGTALIKKYPKLESEFVYGDYKVYDVRKMIAKSEQEIGKATAKYFFYSNIMNFFKTEITLANGEIRKRPLIETNGETGEIVWDKGRDFATVRKVLSMPQVNIVKKTEVQTGGFSKESILPKRNSDKLIARKKDWDPKKYGGFDSPTVAYSVLVVAKVEKGKSKKLKSVKELLGITIMERSSFEKNPIDFLEAKGYKEVKKDLIIKLPKYSLFELENGRKRMLASAGELQKGNELALPSKYVNFLYLASHYEKLKGSPEDNEQKQLFVEQHKHYLDEIIEQISEFSKRVILADANLDKVLSAYNKHRDKPIREQAENIIHLFTLTNLGAPAAFKYFDTTIDRKRYTSTKEVLDATLIHQSITGLYETRIDLSQLGGDGGGGSGSSPAPGGTAPLEEEYRLFLEAPIQNVTLLEQWKREIPKVWAEINPPGLASTQAPIHVQLLSTALPVRVRQYPITLEAKRSLRETIRKFRAAGILRPVHSPWNTPLLPVRKSGTSEYRMVQDLREVNKRVETIHPTVPNPYTLLSLLPPDRIWYSVLDLKDAFFCIPLAPESQLIFAFEWADAEEGESGQLTWTRLPQGFKNSPTLFNEALNRDLQGFRLDHPSVSLLQYVDDLLIAADTQAACLSATRDLLMTLAELGYRVSGKKAQLCQEEVTYLGFKIHKGSRSLSNSRTQAILQIPVPKTKRQVREFLGTIGYCRLWIPGFAELAQPLYAATRPGNDPLVWGEKEEEAFQSLKLALTQPPALALPSLDKPFQLFVEETSGAAKGVLTQALGPWKRPVAYLSKRLDPVAAGWPRCLRAIAAAALLTREASKLTFGQDIEITSSHNLESLLRSPPDKWLTNARITQYQVLLLDPPRVRFKQTAALNPATLLPETDDTLPIHHCLDTLDSLTSTRPDLTDQPLAQAEATLFTDGSSYIRDGKRYAGAAVVTLDSVIWAEPLPIGTSAQKAELIALTKALEWSKDKSVNIYTDSRYAFATLHVHGMIYRERGWLTAGGKAIKNAPEILALLTAVWLPKRVAVMHCKGHQKDDAPTSTGNRRADEVAREVAIRPLSTQATISAGKRTADGSEFEKRTADGSEFESPKKKAKVE

SEQ ID NO: 7123 - protein, 2096 aa, synthetic construct
MPAAKRVKLDGGDKKYSIGLDIGTNSVGWAVITDEYKVPSKKFKVLGNTDRHSIKKNLIGALLFDSGETAEATRLKRTARRRYTRRKNRICYLQEIFSNEMAKVDDSFFHRLEESFLVEEDKKHERHPIFGNIVDEVAYHEKYPTIYHLRKKLVDSTDKADLRLIYLALAHMIKFRGHFLIEGDLNPDNSDVDKLFIQLVQTYNQLFEENPINASGVDAKAILSARLSKSRRLENLIAQLPGEKKNGLFGNLIALSLGLTPNFKSNFDLAEDAKLQLSKDTYDDDLDNLLAQIGDQYADLFLAAKNLSDAILLSDILRVNTEITKAPLSASMIKRYDEHHQDLTLLKALVRQQLPEKYKEIFFDQSKNGYAGYIDGGASQEEFYKFIKPILEKMDGTEELLVKLNREDLLRKQRTFDNGSIPHQIHLGELHAILRRQEDFYPFLKDNREKIEKILTFRIPYYVGPLARGNSRFAWMTRKSEETITPWNFEEVVDKGASAQSFIERMTNFDKNLPNEKVLPKHSLLYEYFTVYNELTKVKYVTEGMRKPAFLSGEQKKAIVDLLFKTNRKVTVKQLKEDYFKKIECFDSVEISGVEDRFNASLGTYHDLLKIIKDKDFLDNEENEDILEDIVLTLTLFEDREMIEERLKTYAHLFDDKVMKQLKRRRYTGWGRLSRKLINGIRDKQSGKTILDFLKSDGFANRNFMQLIHDDSLTFKEDIQKAQVSGQGDSLHEHIANLAGSPAIKKGILQTVKVVDELVKVMGRHKPENIVIEMARENQTTQKGQKNSRERMKRIEEGIKELGSQILKEHPVENTQLQNEKLYLYYLQNGRDMYVDQELDINRLSDYDVDHIVPQSFLKDDSIDNKVLTRSDKARGKSDNVPSEEVVKKMKNYWRQLLNAKLITQRKFDNLTKAERGGLSELDKAGFIKRQLVETRQITKHVAQILDSRMNTKYDENDKLIREVKVITLKSKLVSDFRKDFQFYKVREINNYHHAHDAYLNAVVGTALIKKYPKLESEFVYGDYKVYDVRKMIAKSEQEIGKATAKYFFYSNIMNFFKTEITLANGEIRKRPLIETNGETGEIVWDKGRDFATVRKVLSMPQVNIVKKTEVQTGGFSKESILPKRNSDKLIARKKDWDPKKYGGFDSPTVAYSVLVVAKVEKGKSKKLKSVKELLGITIMERSSFEKNPIDFLEAKGYKEVKKDLIIKLPKYSLFELENGRKRMLASAGELQKGNELALPSKYVNFLYLASHYEKLKGSPEDNEQKQLFVEQHKHYLDEIIEQISEFSKRVILADANLDKVLSAYNKHRDKPIREQAENIIHLFTLTNLGAPAAFKYFDTTIDRKRYTSTKEVLDATLIHQSITGLYETRIDLSQLGGDGGGGSGSSPAPGGTAPLEEEYRLFLEAPIQNVTLLEQWKREIPKVWAEINPPGLASTQAPIHVQLLSTALPVRVRQYPITLEAKRSLRETIRKFRAAGILRPVHSPWNTPLLPVRKSGTSEYRMVQDLREVNKRVETIHPTVPNPYTLLSLLPPDRIWYSVLDLKDAFFCIPLAPESQLIFAFEWADAEEGESGQLTWTRLPQGFKNSPTLFNEALNRDLQGFRLDHPSVSLLQYVDDLLIAADTQAACLSATRDLLMTLAELGYRVSGKKAQLCQEEVTYLGFKIHKGSRSLSNSRTQAILQIPVPKTKRQVREFLGKIGYCRLFIPGFAELAQPLYAATRPGNDPLVWGEKEEEAFQSLKLALTQPPALALPSLDKPFQLFVEETSGAAKGVLTQALGPWKRPVAYLSKRLDPVAAGWPRCLRAIAAAALLTREASKLTFGQDIEITSSHNLESLLRSPPDKWLTNARITQYQVLLLDPPRVRFKQTAALNPATLLPETDDTLPIHHCLDTLDSLTSTRPDLTDQPLAQAEATLFTDGSSYIRDGKRYAGAAVVTLDSVIWAEPLPIGTSAQKAELIALTKALEWSKDKSVNIYTDSRYAFATLHVHGMIYRERGWLTAGGKAIKNAPEILALLTAVWLPKRVAVMHCKGHQKDDAPTSTGNRRADEVAREVAIRPLSTQATISAGKRTADGSEFEKRTADGSEFESPKKKAKVE

SEQ ID NO: 7124 - protein, 2093 aa, synthetic construct
MPAAKRVKLDGGDKKYSIGLDIGTNSVGWAVITDEYKVPSKKFKVLGNTDRHSIKKNLIGALLFDSGETAEATRLKRTARRRYTRRKNRICYLQEIFSNEMAKVDDSFFHRLEESFLVEEDKKHERHPIFGNIVDEVAYHEKYPTIYHLRKKLVDSTDKADLRLIYLALAHMIKFRGHFLIEGDLNPDNSDVDKLFIQLVQTYNQLFEENPINASGVDAKAILSARLSKSRRLENLIAQLPGEKKNGLFGNLIALSLGLTPNFKSNFDLAEDAKLQLSKDTYDDDLDNLLAQIGDQYADLFLAAKNLSDAILLSDILRVNTEITKAPLSASMIKRYDEHHQDLTLLKALVRQQLPEKYKEIFFDQSKNGYAGYIDGGASQEEFYKFIKPILEKMDGTEELLVKLNREDLLRKQRTFDNGSIPHQIHLGELHAILRRQEDFYPFLKDNREKIEKILTFRIPYYVGPLARGNSRFAWMTRKSEETITPWNFEEVVDKGASAQSFIERMTNFDKNLPNEKVLPKHSLLYEYFTVYNELTKVKYVTEGMRKPAFLSGEQKKAIVDLLFKTNRKVTVKQLKEDYFKKIECFDSVEISGVEDRFNASLGTYHDLLKIIKDKDFLDNEENEDILEDIVLTLTLFEDREMIEERLKTYAHLFDDKVMKQLKRRRYTGWGRLSRKLINGIRDKQSGKTILDFLKSDGFANRNFMQLIHDDSLTFKEDIQKAQVSGQGDSLHEHIANLAGSPAIKKGILQTVKVVDELVKVMGRHKPENIVIEMARENQTTQKGQKNSRERMKRIEEGIKELGSQILKEHPVENTQLQNEKLYLYYLQNGRDMYVDQELDINRLSDYDVDHIVPQSFLKDDSIDNKVLTRSDKARGKSDNVPSEEVVKKMKNYWRQLLNAKLITQRKFDNLTKAERGGLSELDKAGFIKRQLVETRQITKHVAQILDSRMNTKYDENDKLIREVKVITLKSKLVSDFRKDFQFYKVREINNYHHAHDAYLNAVVGTALIKKYPKLESEFVYGDYKVYDVRKMIAKSEQEIGKATAKYFFYSNIMNFFKTEITLANGEIRKRPLIETNGETGEIVWDKGRDFATVRKVLSMPQVNIVKKTEVQTGGFSKESILPKRNSDKLIARKKDWDPKKYGGFDSPTVAYSVLVVAKVEKGKSKKLKSVKELLGITIMERSSFEKNPIDFLEAKGYKEVKKDLIIKLPKYSLFELENGRKRMLASAGELQKGNELALPSKYVNFLYLASHYEKLKGSPEDNEQKQLFVEQHKHYLDEIIEQISEFSKRVILADANLDKVLSAYNKHRDKPIREQAENIIHLFTLTNLGAPAAFKYFDTTIDRKRYTSTKEVLDATLIHQSITGLYETRIDLSQLGGDGGGGSGSSPAPGGTLQLEEEYRLFEPESTQKQEMDIWLKNFPQAWAETGGMGTAHCQAPVLIQLKATATPISIRQYPMPHEAYQGIKPHIRRMLDQGILKPCQSPWNTPLLPVKKPGTEDYRPVQDLREVNKRVEDIHPTVPNPYNLLSTLPPSHPWYTVLDLKDAFFCLRLHSESQLLFAFEWRDPEIGLSGQLTWTRLPQGFKNSPTLFNEALHSDLADFRVRYPALVLLQYVDDLLLAAATRTECLEGTKALLETLGNKGYRASAKKAQICLQEVTYLGYSLKDGQRWLTKARKEAILSIPVPKNSRQVREFLGTAGYCRLWIPGFAELAAPLYPLTRPGTLFQWGTEQQLAFEDIKKALLSSPALGLPDITKPFELFIDENSGFAKGVLVQKLGPWKRPVAYLSKKLDTVASGWPPCLRMVAAIAILVKDAGKLTLGQPLTILTSHPVEALVRQPPNKWLSNARMTHYQAMLLDAERVHFGPTVSLNPATLLPLPSGGNHHDCLQILAETHGTRPDLTDQPLPDADLTWYTDGSSFIRNGEREAGAAVTTESEVIWAAPLPPGTSAQRAELIALTQALKMAEGKKLTVYTDSRYAFATTHVHGEIYRRRGWLTSEGKEIKNKNEILALLEALFLPKRLSIIHCPGHQKGDSPQAKGNRLADDTAKKAATETHSSLTVLPAGKRTADGSEFEKRTADGSEFESPKKKAKVE

SEQ ID NO: 7125 - protein, 2085 aa, synthetic construct
MPAAKRVKLDGGDKKYSIGLDIGTNSVGWAVITDEYKVPSKKFKVLGNTDRHSIKKNLIGALLFDSGETAEATRLKRTARRRYTRRKNRICYLQEIFSNEMAKVDDSFFHRLEESFLVEEDKKHERHPIFGNIVDEVAYHEKYPTIYHLRKKLVDSTDKADLRLIYLALAHMIKFRGHFLIEGDLNPDNSDVDKLFIQLVQTYNQLFEENPINASGVDAKAILSARLSKSRRLENLIAQLPGEKKNGLFGNLIALSLGLTPNFKSNFDLAEDAKLQLSKDTYDDDLDNLLAQIGDQYADLFLAAKNLSDAILLSDILRVNTEITKAPLSASMIKRYDEHHQDLTLLKALVRQQLPEKYKEIFFDQSKNGYAGYIDGGASQEEFYKFIKPILEKMDGTEELLVKLNREDLLRKQRTFDNGSIPHQIHLGELHAILRRQEDFYPFLKDNREKIEKILTFRIPYYVGPLARGNSRFAWMTRKSEETITPWNFEEVVDKGASAQSFIERMTNFDKNLPNEKVLPKHSLLYEYFTVYNELTKVKYVTEGMRKPAFLSGEQKKAIVDLLFKTNRKVTVKQLKEDYFKKIECFDSVEISGVEDRFNASLGTYHDLLKIIKDKDFLDNEENEDILEDIVLTLTLFEDREMIEERLKTYAHLFDDKVMKQLKRRRYTGWGRLSRKLINGIRDKQSGKTILDFLKSDGFANRNFMQLIHDDSLTFKEDIQKAQVSGQGDSLHEHIANLAGSPAIKKGILQTVKVVDELVKVMGRHKPENIVIEMARENQTTQKGQKNSRERMKRIEEGIKELGSQILKEHPVENTQLQNEKLYLYYLQNGRDMYVDQELDINRLSDYDVDHIVPQSFLKDDSIDNKVLTRSDKARGKSDNVPSEEVVKKMKNYWRQLLNAKLITQRKFDNLTKAERGGLSELDKAGFIKRQLVETRQITKHVAQILDSRMNTKYDENDKLIREVKVITLKSKLVSDFRKDFQFYKVREINNYHHAHDAYLNAVVGTALIKKYPKLESEFVYGDYKVYDVRKMIAKSEQEIGKATAKYFFYSNIMNFFKTEITLANGEIRKRPLIETNGETGEIVWDKGRDFATVRKVLSMPQVNIVKKTEVQTGGFSKESILPKRNSDKLIARKKDWDPKKYGGFDSPTVAYSVLVVAKVEKGKSKKLKSVKELLGITIMERSSFEKNPIDFLEAKGYKEVKKDLIIKLPKYSLFELENGRKRMLASAGELQKGNELALPSKYVNFLYLASHYEKLKGSPEDNEQKQLFVEQHKHYLDEIIEQISEFSKRVILADANLDKVLSAYNKHRDKPIREQAENIIHLFTLTNLGAPAAFKYFDTTIDRKRYTSTKEVLDATLIHQSITGLYETRIDLSQLGGDGGGGSGSSPAPGGVPWLTQQPLQLTILVPLQEYQEKILSKTALPEDQKQQLKTLFVKYDNLWQHWENQVGHRKIRPHNIATGDYPPRPQKQYPINPKAKPSIQIVIDDLLKQGVLTPQNSTMNTPVYPVPKPDGRWRMVLDYREVNKTIPLTAAQNQHSAGILATIVRQKYKTTLDLANGFWAHPITPESYWLTAFTWQGKQYCWTRLPQGFLNSPALFNADVVDLLKEIPNVQVYVDDIYLSHDDPKEHVQQLEKVFQILLQAGYVVSLKKSEIGQKTVEFLGFNITKEGRGLTDTFKTKLLNITPPKDLKQLQSILGLLNFARNFIPNFAELVQPLYNLIAPAKGKYIEWSEENTKQLNMVIEALNTASNLEERLPEQRLVIKVNTSPSAGYVRYYNETGKKPIMYLNYVFSKAELKFSMLEKLLTTMHKALIKAMDLAMGQEILVYSPIVSMTKIQKTPLPERKALPIRWITWMTYLEDPRIQFHYDKTLPELKHIPDVYTSSQSPVKHPSQYEGVFYTDGSAIKSPDPTKSNNAGMGIVHATYKPEYQVLNQWSIPLGNHTAQMAEIAAVEFACKKALKIPGPVLVITDSFYVAESANKELPYWKSNGFVNNKKKPLKHISKWKSIAECLSMKPDITIQHEKGISLQIPVFILKGNALADKLATQGSYVVNAGKRTADGSEFEKRTADGSEFESPKKKAKVE

SEQ ID NO: 7126 - protein, 2216 aa, synthetic construct
MPAAKRVKLDGGDKKYSIGLDIGTNSVGWAVITDEYKVPSKKFKVLGNTDRHSIKKNLIGALLFDSGETAEATRLKRTARRRYTRRKNRICYLQEIFSNEMAKVDDSFFHRLEESFLVEEDKKHERHPIFGNIVDEVAYHEKYPTIYHLRKKLVDSTDKADLRLIYLALAHMIKFRGHFLIEGDLNPDNSDVDKLFIQLVQTYNQLFEENPINASGVDAKAILSARLSKSRRLENLIAQLPGEKKNGLFGNLIALSLGLTPNFKSNFDLAEDAKLQLSKDTYDDDLDNLLAQIGDQYADLFLAAKNLSDAILLSDILRVNTEITKAPLSASMIKRYDEHHQDLTLLKALVRQQLPEKYKEIFFDQSKNGYAGYIDGGASQEEFYKFIKPILEKMDGTEELLVKLNREDLLRKQRTFDNGSIPHQIHLGELHAILRRQEDFYPFLKDNREKIEKILTFRIPYYVGPLARGNSRFAWMTRKSEETITPWNFEEVVDKGASAQSFIERMTNFDKNLPNEKVLPKHSLLYEYFTVYNELTKVKYVTEGMRKPAFLSGEQKKAIVDLLFKTNRKVTVKQLKEDYFKKIECFDSVEISGVEDRFNASLGTYHDLLKIIKDKDFLDNEENEDILEDIVLTLTLFEDREMIEERLKTYAHLFDDKVMKQLKRRRYTGWGRLSRKLINGIRDKQSGKTILDFLKSDGFANRNFMQLIHDDSLTFKEDIQKAQVSGQGDSLHEHIANLAGSPAIKKGILQTVKVVDELVKVMGRHKPENIVIEMARENQTTQKGQKNSRERMKRIEEGIKELGSQILKEHPVENTQLQNEKLYLYYLQNGRDMYVDQELDINRLSDYDVDHIVPQSFLKDDSIDNKVLTRSDKARGKSDNVPSEEVVKKMKNYWRQLLNAKLITQRKFDNLTKAERGGLSELDKAGFIKRQLVETRQITKHVAQILDSRMNTKYDENDKLIREVKVITLKSKLVSDFRKDFQFYKVREINNYHHAHDAYLNAVVGTALIKKYPKLESEFVYGDYKVYDVRKMIAKSEQEIGKATAKYFFYSNIMNFFKTEITLANGEIRKRPLIETNGETGEIVWDKGRDFATVRKVLSMPQVNIVKKTEVQTGGFSKESILPKRNSDKLIARKKDWDPKKYGGFDSPTVAYSVLVVAKVEKGKSKKLKSVKELLGITIMERSSFEKNPIDFLEAKGYKEVKKDLIIKLPKYSLFELENGRKRMLASAGELQKGNELALPSKYVNFLYLASHYEKLKGSPEDNEQKQLFVEQHKHYLDEIIEQISEFSKRVILADANLDKVLSAYNKHRDKPIREQAENIIHLFTLTNLGAPAAFKYFDTTIDRKRYTSTKEVLDATLIHQSITGLYETRIDLSQLGGDGGGGSGSSPAPGGTLGDQGSRGSDPLPEPRVTLTVEGIPTEFLVNTGAEHSVLTKPMGKMGSKRTVVAGATGSKVYPWTTKRLLKIGQKQVTHSFLVIPECPAPLLGRDLLTKLKAQIQFSTEGPQVTWEDRPAMCLVLNLEEEYRLHEKPVPPSIDPSWLQLFPMVWAEKAGMGLANQVPPVVVELKSDASPVAVRQYPMSKEAREGIRPHIQRFLDLGILVPCQSPWNTPLLPVKKPGTNDYRPVQDLREVNKRVQDIHPTVPNPYNLLSSLPPSHTWYSVLDLKDAFFCLKLHPNSQPLFAFEWRDPEKGNTGQLTWTRLPQGFKNSPTLFDEALHRDLASFRALNPQVVMLQYVDDLLVAAPTYRDCKEGTRRLLQELSKLGYRVSAKKAQLCREEVTYLGYLLKGGKRWLTPARKATVMKIPTPTTPRQVREFLGTAGFCRLWIPGFASLAAPLYPLTREKVPFTWTEAHQEAFGRIKEALLSAPALALPDLTKPFALYVDEKEGVARGVLTQTLGPWRRPVAYLSKKLDPVASGWPTCLKAIAAVALLLKDADKLTLGQNVLVIAPHNLESIVRQPPDRWMTNARMTHYQSLLLNERVSFAPPAILNPATLLPVESDDTPIHICSEILAEETGTRPDLRDQPLPGVPAWYTDGSSFIMDGRRQAGAAIVDNKRTVWASNLPEGTSAQKAELIALTQALRLAEGKSINIYTDSRYAFATAHVHGAIYKQRGLLTSAGKDIKNKEEILALLEAIHLPKRVAIIHCPGHQRGTDPVATGNRKADEAAKQAAQSTRILTETTKNAGKRTADGSEFEKRTADGSEFESPKKKAKVE

SEQ ID NO: 7127 - protein, 2125 aa, synthetic construct
MPAAKRVKLDGGDKKYSIGLDIGTNSVGWAVITDEYKVPSKKFKVLGNTDRHSIKKNLIGALLFDSGETAEATRLKRTARRRYTRRKNRICYLQEIFSNEMAKVDDSFFHRLEESFLVEEDKKHERHPIFGNIVDEVAYHEKYPTIYHLRKKLVDSTDKADLRLIYLALAHMIKFRGHFLIEGDLNPDNSDVDKLFIQLVQTYNQLFEENPINASGVDAKAILSARLSKSRRLENLIAQLPGEKKNGLFGNLIALSLGLTPNFKSNFDLAEDAKLQLSKDTYDDDLDNLLAQIGDQYADLFLAAKNLSDAILLSDILRVNTEITKAPLSASMIKRYDEHHQDLTLLKALVRQQLPEKYKEIFFDQSKNGYAGYIDGGASQEEFYKFIKPILEKMDGTEELLVKLNREDLLRKQRTFDNGSIPHQIHLGELHAILRRQEDFYPFLKDNREKIEKILTFRIPYYVGPLARGNSRFAWMTRKSEETITPWNFEEVVDKGASAQSFIERMTNFDKNLPNEKVLPKHSLLYEYFTVYNELTKVKYVTEGMRKPAFLSGEQKKAIVDLLFKTNRKVTVKQLKEDYFKKIECFDSVEISGVEDRFNASLGTYHDLLKIIKDKDFLDNEENEDILEDIVLTLTLFEDREMIEERLKTYAHLFDDKVMKQLKRRRYTGWGRLSRKLINGIRDKQSGKTILDFLKSDGFANRNFMQLIHDDSLTFKEDIQKAQVSGQGDSLHEHIANLAGSPAIKKGILQTVKVVDELVKVMGRHKPENIVIEMARENQTTQKGQKNSRERMKRIEEGIKELGSQILKEHPVENTQLQNEKLYLYYLQNGRDMYVDQELDINRLSDYDVDHIVPQSFLKDDSIDNKVLTRSDKARGKSDNVPSEEVVKKMKNYWRQLLNAKLITQRKFDNLTKAERGGLSELDKAGFIKRQLVETRQITKHVAQILDSRMNTKYDENDKLIREVKVITLKSKLVSDFRKDFQFYKVREINNYHHAHDAYLNAVVGTALIKKYPKLESEFVYGDYKVYDVRKMIAKSEQEIGKATAKYFFYSNIMNFFKTEITLANGEIRKRPLIETNGETGEIVWDKGRDFATVRKVLSMPQVNIVKKTEVQTGGFSKESILPKRNSDKLIARKKDWDPKKYGGFDSPTVAYSVLVVAKVEKGKSKKLKSVKELLGITIMERSSFEKNPIDFLEAKGYKEVKKDLIIKLPKYSLFELENGRKRMLASAGELQKGNELALPSKYVNFLYLASHYEKLKGSPEDNEQKQLFVEQHKHYLDEIIEQISEFSKRVILADANLDKVLSAYNKHRDKPIREQAENIIHLFTLTNLGAPAAFKYFDTTIDRKRYTSTKEVLDATLIHQSITGLYETRIDLSQLGGDGGGGSGSSPAPGGLLGRDLLTKLKAQIQFSTEGPQVTWEDRPAMCLVLNLEEEYRLHEKPVPPSIDPSWLQLFPMVWAEKAGMGLANQVPPVVVELKSDASPVAVRQYPMSKEAREGIRPHIQRFLDLGILVPCQSPWNTPLLPVKKPGTNDYRPVQDLREVNKRVQDIHPTVPNPYNLLSSLPPSHTWYSVLDLKDAFFCLKLHPNSQPLFAFEWRDPEKGNTGQLTWTRLPQGFKNSPTLFNEALHRDLASFRALNPQVVMLQYVDDLLVAAPTYRDCKEGTRRLLQELSKLGYRVSAKKAQLCREEVTYLGYLLKGGKRWLTPARKATVMKIPTPTTPRQVREFLGKAGFCRLFIPGFASLAAPLYPLTRPKVPFTWTEAHQEAFGRIKEALLSAPALALPDLTKPFALYVDEKEGVARGVLTQTLGPWRRPVAYLSKKLDPVASGWPTCLKAIAAVALLLKDADKLTLGQNVLVIAPHNLESIVRQPPDRWMTNARMTHYQSLLLNERVSFAPPAILNPATLLPVESDDTPIHICSEILAEETGTRPDLRDQPLPGVPAWYTDGSSFIMDGRRQAGAAIVDNKRTVWASNLPEGTSAQKAELIALTQALRLAEGKSINIYTDSRYAFATAHVHGAIYKQRGWLTSAGKDIKNKEEILALLEAIHLPKRVAIIHCPGHQRGTDPVATGNRKADEAAKQAAQSTRILTETTKNAGKRTADGSEFEKRTADGSEFESPKKKAKVE

SEQ ID NO: 7128 - protein, 2216 aa, synthetic construct
MPAAKRVKLDGGDKKYSIGLDIGTNSVGWAVITDEYKVPSKKFKVLGNTDRHSIKKNLIGALLFDSGETAEATRLKRTARRRYTRRKNRICYLQEIFSNEMAKVDDSFFHRLEESFLVEEDKKHERHPIFGNIVDEVAYHEKYPTIYHLRKKLVDSTDKADLRLIYLALAHMIKFRGHFLIEGDLNPDNSDVDKLFIQLVQTYNQLFEENPINASGVDAKAILSARLSKSRRLENLIAQLPGEKKNGLFGNLIALSLGLTPNFKSNFDLAEDAKLQLSKDTYDDDLDNLLAQIGDQYADLFLAAKNLSDAILLSDILRVNTEITKAPLSASMIKRYDEHHQDLTLLKALVRQQLPEKYKEIFFDQSKNGYAGYIDGGASQEEFYKFIKPILEKMDGTEELLVKLNREDLLRKQRTFDNGSIPHQIHLGELHAILRRQEDFYPFLKDNREKIEKILTFRIPYYVGPLARGNSRFAWMTRKSEETITPWNFEEVVDKGASAQSFIERMTNFDKNLPNEKVLPKHSLLYEYFTVYNELTKVKYVTEGMRKPAFLSGEQKKAIVDLLFKTNRKVTVKQLKEDYFKKIECFDSVEISGVEDRFNASLGTYHDLLKIIKDKDFLDNEENEDILEDIVLTLTLFEDREMIEERLKTYAHLFDDKVMKQLKRRRYTGWGRLSRKLINGIRDKQSGKTILDFLKSDGFANRNFMQLIHDDSLTFKEDIQKAQVSGQGDSLHEHIANLAGSPAIKKGILQTVKVVDELVKVMGRHKPENIVIEMARENQTTQKGQKNSRERMKRIEEGIKELGSQILKEHPVENTQLQNEKLYLYYLQNGRDMYVDQELDINRLSDYDVDHIVPQSFLKDDSIDNKVLTRSDKARGKSDNVPSEEVVKKMKNYWRQLLNAKLITQRKFDNLTKAERGGLSELDKAGFIKRQLVETRQITKHVAQILDSRMNTKYDENDKLIREVKVITLKSKLVSDFRKDFQFYKVREINNYHHAHDAYLNAVVGTALIKKYPKLESEFVYGDYKVYDVRKMIAKSEQEIGKATAKYFFYSNIMNFFKTEITLANGEIRKRPLIETNGETGEIVWDKGRDFATVRKVLSMPQVNIVKKTEVQTGGFSKESILPKRNSDKLIARKKDWDPKKYGGFDSPTVAYSVLVVAKVEKGKSKKLKSVKELLGITIMERSSFEKNPIDFLEAKGYKEVKKDLIIKLPKYSLFELENGRKRMLASAGELQKGNELALPSKYVNFLYLASHYEKLKGSPEDNEQKQLFVEQHKHYLDEIIEQISEFSKRVILADANLDKVLSAYNKHRDKPIREQAENIIHLFTLTNLGAPAAFKYFDTTIDRKRYTSTKEVLDATLIHQSITGLYETRIDLSQLGGDGGGGSGSSPAPGGTLGDQGSRGSDPLPEPRVTLTVEGIPTEFLVNTGAEHSVLTKPMGKMGSKRTVVAGATGSKVYPWTTKRLLKIGQKQVTHSFLVIPECPAPLLGRDLLTKLKAQIQFSTEGPQVTWEDRPAMCLVLNLEEEYRLHEKPVPPSIDPSWLQLFPMVWAEKAGMGLANQVPPVVVELKSDASPVAVRQYPMSKEAREGIRPHIQRFLDLGILVPCQSPWNTPLLPVKKPGTNDYRPVQDLREVNKRVQDIHPTVPNPYNLLSSLPPSHTWYSVLDLKDAFFCLKLHPNSQPLFAFEWRDPEKGNTGQLTWTRLPQGFKNSPTLFNEALHRDLASFRALNPQVVMLQYVDDLLVAAPTYRDCKEGTRRLLQELSKLGYRVSAKKAQLCREEVTYLGYLLKGGKRWLTPARKATVMKIPTPTTPRQVREFLGKAGFCRLFIPGFASLAAPLYPLTRPKVPFTWTEAHQEAFGRIKEALLSAPALALPDLTKPFALYVDEKEGVARGVLTQTLGPWRRPVAYLSKKLDPVASGWPTCLKAIAAVALLLKDADKLTLGQNVLVIAPHNLESIVRQPPDRWMTNARMTHYQSLLLNERVSFAPPAILNPATLLPVESDDTPIHICSEILAEETGTRPDLRDQPLPGVPAWYTDGSSFIMDGRRQAGAAIVDNKRTVWASNLPEGTSAQKAELIALTQALRLAEGKSINIYTDSRYAFATAHVHGAIYKQRGWLTSAGKDIKNKEEILALLEAIHLPKRVAIIHCPGHQRGTDPVATGNRKADEAAKQAAQSTRILTETTKNAGKRTADGSEFEKRTADGSEFESPKKKAKVE

SEQ ID NO: 7129 - protein, 2094 aa, synthetic construct
MPAAKRVKLDGGDKKYSIGLDIGTNSVGWAVITDEYKVPSKKFKVLGNTDRHSIKKNLIGALLFDSGETAEATRLKRTARRRYTRRKNRICYLQEIFSNEMAKVDDSFFHRLEESFLVEEDKKHERHPIFGNIVDEVAYHEKYPTIYHLRKKLVDSTDKADLRLIYLALAHMIKFRGHFLIEGDLNPDNSDVDKLFIQLVQTYNQLFEENPINASGVDAKAILSARLSKSRRLENLIAQLPGEKKNGLFGNLIALSLGLTPNFKSNFDLAEDAKLQLSKDTYDDDLDNLLAQIGDQYADLFLAAKNLSDAILLSDILRVNTEITKAPLSASMIKRYDEHHQDLTLLKALVRQQLPEKYKEIFFDQSKNGYAGYIDGGASQEEFYKFIKPILEKMDGTEELLVKLNREDLLRKQRTFDNGSIPHQIHLGELHAILRRQEDFYPFLKDNREKIEKILTFRIPYYVGPLARGNSRFAWMTRKSEETITPWNFEEVVDKGASAQSFIERMTNFDKNLPNEKVLPKHSLLYEYFTVYNELTKVKYVTEGMRKPAFLSGEQKKAIVDLLFKTNRKVTVKQLKEDYFKKIECFDSVEISGVEDRFNASLGTYHDLLKIIKDKDFLDNEENEDILEDIVLTLTLFEDREMIEERLKTYAHLFDDKVMKQLKRRRYTGWGRLSRKLINGIRDKQSGKTILDFLKSDGFANRNFMQLIHDDSLTFKEDIQKAQVSGQGDSLHEHIANLAGSPAIKKGILQTVKVVDELVKVMGRHKPENIVIEMARENQTTQKGQKNSRERMKRIEEGIKELGSQILKEHPVENTQLQNEKLYLYYLQNGRDMYVDQELDINRLSDYDVDHIVPQSFLKDDSIDNKVLTRSDKARGKSDNVPSEEVVKKMKNYWRQLLNAKLITQRKFDNLTKAERGGLSELDKAGFIKRQLVETRQITKHVAQILDSRMNTKYDENDKLIREVKVITLKSKLVSDFRKDFQFYKVREINNYHHAHDAYLNAVVGTALIKKYPKLESEFVYGDYKVYDVRKMIAKSEQEIGKATAKYFFYSNIMNFFKTEITLANGEIRKRPLIETNGETGEIVWDKGRDFATVRKVLSMPQVNIVKKTEVQTGGFSKESILPKRNSDKLIARKKDWDPKKYGGFDSPTVAYSVLVVAKVEKGKSKKLKSVKELLGITIMERSSFEKNPIDFLEAKGYKEVKKDLIIKLPKYSLFELENGRKRMLASAGELQKGNELALPSKYVNFLYLASHYEKLKGSPEDNEQKQLFVEQHKHYLDEIIEQISEFSKRVILADANLDKVLSAYNKHRDKPIREQAENIIHLFTLTNLGAPAAFKYFDTTIDRKRYTSTKEVLDATLIHQSITGLYETRIDLSQLGGDGGGGSGSSPAPGGTLNLEDEYRLYETSAEPEVSPGSTWLSDFPQAWAETGGMGLAVRQAPLIIPLKATSTPVSIKQYPMSQEAKLGIKPHIQRLLDQGILVPCQSPWNTPLLPVKKPGTNDYRPVQDLREVNKRVEDIHPTVPNPYNLLSGLPPSHRWYTVLDLKDAFFCLRLHPTSQPLFAFEWRDPGMGISGQLTWTRLPQGFKNSPTLFNEALHRDLADFRIQHPDLILLQYVDDILLAATSELDCQQGTRALLLTLGNLGYRASAKKAQLCQKQVKYLGYLLKEGQRWLTEARKETVMGQPTPKTPRQLREFLGKAGFCRLFIPGFAEMAAPLYPLTKPGTLFNWGPDQQKAYQEIKQALLTAPALGLPDLTKPFELFVDEKQGYAKGVLTQKLGPWRRPVAYLSKKLDPVAAGWPPCLRMVAAIAVLRKDAGKLTMGQPLVILAPHAVEALVKQPPDRWLSNARMTHYQAMLLDTDRVQFGPVVALNPATLLPLPEEGAPHDCLEILAETHGTRPDLTDQPIPDADHTWYTDGSSFLQEGQRKAGAAVTTETEVIWARALPAGTSAQRAELIALTQALKMAEGKRLNVYTDSRYAFATAHIHGEIYRRRGWLTSEGREIKNKSEILALLKALFLPKRLSIIHCLGHQKGDSAEARGNRLADQAAREAAIKTPPDTSTLLAGKRTADGSEFEKRTADGSEFESPKKKAKVE

SEQ ID NO: 7130 - protein, 2094 aa, synthetic construct
MPAAKRVKLDGGDKKYSIGLDIGTNSVGWAVITDEYKVPSKKFKVLGNTDRHSIKKNLIGALLFDSGETAEATRLKRTARRRYTRRKNRICYLQEIFSNEMAKVDDSFFHRLEESFLVEEDKKHERHPIFGNIVDEVAYHEKYPTIYHLRKKLVDSTDKADLRLIYLALAHMIKFRGHFLIEGDLNPDNSDVDKLFIQLVQTYNQLFEENPINASGVDAKAILSARLSKSRRLENLIAQLPGEKKNGLFGNLIALSLGLTPNFKSNFDLAEDAKLQLSKDTYDDDLDNLLAQIGDQYADLFLAAKNLSDAILLSDILRVNTEITKAPLSASMIKRYDEHHQDLTLLKALVRQQLPEKYKEIFFDQSKNGYAGYIDGGASQEEFYKFIKPILEKMDGTEELLVKLNREDLLRKQRTFDNGSIPHQIHLGELHAILRRQEDFYPFLKDNREKIEKILTFRIPYYVGPLARGNSRFAWMTRKSEETITPWNFEEVVDKGASAQSFIERMTNFDKNLPNEKVLPKHSLLYEYFTVYNELTKVKYVTEGMRKPAFLSGEQKKAIVDLLFKTNRKVTVKQLKEDYFKKIECFDSVEISGVEDRFNASLGTYHDLLKIIKDKDFLDNEENEDILEDIVLTLTLFEDREMIEERLKTYAHLFDDKVMKQLKRRRYTGWGRLSRKLINGIRDKQSGKTILDFLKSDGFANRNFMQLIHDDSLTFKEDIQKAQVSGQGDSLHEHIANLAGSPAIKKGILQTVKVVDELVKVMGRHKPENIVIEMARENQTTQKGQKNSRERMKRIEEGIKELGSQILKEHPVENTQLQNEKLYLYYLQNGRDMYVDQELDINRLSDYDVDHIVPQSFLKDDSIDNKVLTRSDKARGKSDNVPSEEVVKKMKNYWRQLLNAKLITQRKFDNLTKAERGGLSELDKAGFIKRQLVETRQITKHVAQILDSRMNTKYDENDKLIREVKVITLKSKLVSDFRKDFQFYKVREINNYHHAHDAYLNAVVGTALIKKYPKLESEFVYGDYKVYDVRKMIAKSEQEIGKATAKYFFYSNIMNFFKTEITLANGEIRKRPLIETNGETGEIVWDKGRDFATVRKVLSMPQVNIVKKTEVQTGGFSKESILPKRNSDKLIARKKDWDPKKYGGFDSPTVAYSVLVVAKVEKGKSKKLKSVKELLGITIMERSSFEKNPIDFLEAKGYKEVKKDLIIKLPKYSLFELENGRKRMLASAGELQKGNELALPSKYVNFLYLASHYEKLKGSPEDNEQKQLFVEQHKHYLDEIIEQISEFSKRVILADANLDKVLSAYNKHRDKPIREQAENIIHLFTLTNLGAPAAFKYFDTTIDRKRYTSTKEVLDATLIHQSITGLYETRIDLSQLGGDGGGGSGSSPAPGGLGIEDEYRLHETSTEPDVSLGSTWLSDFPQAWAETGGMGLAVRQAPLIIPLKATSTPVSIQQYPMSHEARLGIKPHIQRLLDQGILVPCQSPWNTPLLPVKKPGTNDYRPVQDLREVNKRVEDIHPTVPNPYNLLSGLPPSHQWYTVLDLKDAFFCLRLHPTSQPLFAFEWRDPGMGISGQLTWTRLPQGFKNSPTLFNEALHRDLADFRIQHPDLILLQYVDDILLAATSELDCQQGTRALLQTLGDLGYRASAKKAQICQKQVKYLGYLLREGQRWLTEARKETVMGQPVPKTPRQLREFLGKAGFCRLFIPGFAEMAAPLYPLTKPGTLFSWGPDQQKAYQEIKQALLTAPALGLPDLTKPFELFVDEKQGYAKGVLTQKLGPWRRPVAYLSKKLDPVAAGWPPCLRMVAAIAVLTKDAGKLTMGQPLVILAPHAVEALVKQPPDRWLSNARMTHYQAMLLDTDRVQFGPVVALNPATLLPLPEEGAPHDCLEILAETHGTRPDLTDQPIPDADHTWYTDGSSFLQEGQRKAGAAVTTETEVIWAGALPAGTSAQRAELIALTQALKMAEGKRLNVYTDSRYAFATAHIHGEIYRRRGWLTSEGREIKNKSEILALLKALFLPKRLSIIHCLGHQKGDSAEARGNRLADQAAREAAIKTPPDTSTLLIAGKRTADGSEFEKRTADGSEFESPKKKAKVE

SEQ ID NO: 7131 - protein, 2094 aa, synthetic construct; identical to SEQ ID NO: 7130

SEQ ID NO: 7132 - protein, 2094 aa, synthetic construct
MPAAKRVKLDGGDKKYSIGLDIGTNSVGWAVITDEYKVPSKKFKVLGNTDRHSIKKNLIGALLFDSGETAEATRLKRTARRRYTRRKNRICYLQEIFSNEMAKVDDSFFHRLEESFLVEEDKKHERHPIFGNIVDEVAYHEKYPTIYHLRKKLVDSTDKADLRLIYLALAHMIKFRGHFLIEGDLNPDNSDVDKLFIQLVQTYNQLFEENPINASGVDAKAILSARLSKSRRLENLIAQLPGEKKNGLFGNLIALSLGLTPNFKSNFDLAEDAKLQLSKDTYDDDLDNLLAQIGDQYADLFLAAKNLSDAILLSDILRVNTEITKAPLSASMIKRYDEHHQDLTLLKALVRQQLPEKYKEIFFDQSKNGYAGYIDGGASQEEFYKFIKPILEKMDGTEELLVKLNREDLLRKQRTFDNGSIPHQIHLGELHAILRRQEDFYPFLKDNREKIEKILTFRIPYYVGPLARGNSRFAWMTRKSEETITPWNFEEVVDKGASAQSFIERMTNFDKNLPNEKVLPKHSLLYEYFTVYNELTKVKYVTEGMRKPAFLSGEQKKAIVDLLFKTNRKVTVKQLKEDYFKKIECFDSVEISGVEDRFNASLGTYHDLLKIIKDKDFLDNEENEDILEDIVLTLTLFEDREMIEERLKTYAHLFDDKVMKQLKRRRYTGWGRLSRKLINGIRDKQSGKTILDFLKSDGFANRNFMQLIHDDSLTFKEDIQKAQVSGQGDSLHEHIANLAGSPAIKKGILQTVKVVDELVKVMGRHKPENIVIEMARENQTTQKGQKNSRERMKRIEEGIKELGSQILKEHPVENTQLQNEKLYLYYLQNGRDMYVDQELDINRLSDYDVDHIVPQSFLKDDSIDNKVLTRSDKARGKSDNVPSEEVVKKMKNYWRQLLNAKLITQRKFDNLTKAERGGLSELDKAGFIKRQLVETRQITKHVAQILDSRMNTKYDENDKLIREVKVITLKSKLVSDFRKDFQFYKVREINNYHHAHDAYLNAVVGTALIKKYPKLESEFVYGDYKVYDVRKMIAKSEQEIGKATAKYFFYSNIMNFFKTEITLANGEIRKRPLIETNGETGEIVWDKGRDFATVRKVLSMPQVNIVKKTEVQTGGFSKESILPKRNSDKLIARKKDWDPKKYGGFDSPTVAYSVLVVAKVEKGKSKKLKSVKELLGITIMERSSFEKNPIDFLEAKGYKEVKKDLIIKLPKYSLFELENGRKRMLASAGELQKGNELALPSKYVNFLYLASHYEKLKGSPEDNEQKQLFVEQHKHYLDEIIEQISEFSKRVILADANLDKVLSAYNKHRDKPIREQAENIIHLFTLTNLGAPAAFKYFDTTIDRKRYTSTKEVLDATLIHQSITGLYETRIDLSQLGGDGGGGSGSSPAPGGTLNIEDEYRLHETSKGPDVPLGSTWLSDFPQAWAETGGMGLAVRQAPLIIPLKATSTPVSIKQYPMSQEARLGIKPHIQRLLDQGILVPCQSPWNTPLLPVKKPGTNDYRPVQDLREVNKRVEDIHPTVPNPYNLLSGLPPSHQWYTVLDLKDAFFCLRLHPTSQSLFAFEWRDPEMGISGQLTWTRLPQGFKNSPTLFNEALHRDLADFRIQHPDLILLQYVDDLLLAATSELDCQQGTRALLQTLGDLGYRASAKKAQICQKQVKYLGYLLKEGQRWLTEARKETVMGQPTPKTPRQLREFLGTAGFCRLWIPGFAEMAAPLYPLTKPGTLFEWGPDQQKAYQEIKQALLTAPALGLPDLTKPFELFVDEKQGYAKGVLTQKLGPWRRPVAYLSKKLDPVAAGWPPCLRMVAAIAVLTKDAGKLTMGQPLVILAPHAVEALVKQPPDRWLSNARMTHYQALLLDTDRVQFGPIVALNPATLLPLPEEGLQHDCLDILAEAHGTRPDLTDQPLPDADHTWYTDGSSFLQEGQRKAGAAVTTETEVVWAKALPAGTSAQRAELIALTQALKMAEGKKLNVYTDSRYAFATAHIHGEIYRRRGWLTSEGKEIKNKDEILALLKALFLPKRLSIIHCPGHQKGNRAEARGNRMADQAAREVATRETPETSTLLAGKRTADGSEFEKRTADGSEFESPKKKAKVE

SEQ ID NO: 7133 - protein, 2094 aa, synthetic construct
MPAAKRVKLDGGDKKYSIGLDIGTNSVGWAVITDEYKVPSKKFKVLGNTDRHSIKKNLIGALLFDSGETAEATRLKRTARRRYTRRKNRICYLQEIFSNEMAKVDDSFFHRLEESFLVEEDKKHERHPIFGNIVDEVAYHEKYPTIYHLRKKLVDSTDKADLRLIYLALAHMIKFRGHFLIEGDLNPDNSDVDKLFIQLVQTYNQLFEENPINASGVDAKAILSARLSKSRRLENLIAQLPGEKKNGLFGNLIALSLGLTPNFKSNFDLAEDAKLQLSKDTYDDDLDNLLAQIGDQYADLFLAAKNLSDAILLSDILRVNTEITKAPLSASMIKRYDEHHQDLTLLKALVRQQLPEKYKEIFFDQSKNGYAGYIDGGASQEEFYKFIKPILEKMDGTEELLVKLNREDLLRKQRTFDNGSIPHQIHLGELHAILRRQEDFYPFLKDNREKIEKILTFRIPYYVGPLARGNSRFAWMTRKSEETITPWNFEEVVDKGASAQSFIERMTNFDKNLPNEKVLPKHSLLYEYFTVYNELTKVKYVTEGMRKPAFLSGEQKKAIVDLLFKTNRKVTVKQLKEDYFKKIECFDSVEISGVEDRFNASLGTYHDLLKIIKDKDFLDNEENEDILEDIVLTLTLFEDREMIEERLKTYAHLFDDKVMKQLKRRRYTGWGRLSRKLINGIRDKQSGKTILDFLKSDGFANRNFMQLIHDDSLTFKEDIQKAQVSGQGDSLHEHIANLAGSPAIKKGILQTVKVVDELVKVMGRHKPENIVIEMARENQTTQKGQKNSRERMKRIEEGIKELGSQILKEHPVENTQLQNEKLYLYYLQNGRDMYVDQELDINRLSDYDVDHIVPQSFLKDDSIDNKVLTRSDKARGKSDNVPSEEVVKKMKNYWRQLLNAKLITQRKFDNLTKAERGGLSELDKAGFIKRQLVETRQITKHVAQILDSRMNTKYDENDKLIREVKVITLKSKLVSDFRKDFQFYKVREINNYHHAHDAYLNAVVGTALIKKYPKLESEFVYGDYKVYDVRKMIAKSEQEIGKATAKYFFYSNIMNFFKTEITLANGEIRKRPLIETNGETGEIVWDKGRDFATVRKVLSMPQVNIVKKTEVQTGGFSKESILPKRNSDKLIARKKDWDPKKYGGFDSPTVAYSVLVVAKVEKGKSKKLKSVKELLGITIMERSSFEKNPIDFLEAKGYKEVKKDLIIKLPKYSLFELENGRKRMLASAGELQKGNELALPSKYVNFLYLASHYEKLKGSPEDNEQKQLFVEQHKHYLDEIIEQISEFSKRVILADANLDKVLSAYNKHRDKPIREQAENIIHLFTLTNLGAPAAFKYFDTTIDRKRYTSTKEVLDATLIHQSITGLYETRIDLSQLGGDGGGGSGSSPAPGGTLNIEDEYRLHEISTEPDVSPGSTWLSDFPQAWAETGGMGLAVRQAPLIIPLKATSTPVSIKQYPMSQEAKLGIKPHIQRLLDQGILVPCQSPWNTPLLPVKKPGTNDYRPVQGLREVNKRVEDIHPTVPNPYNLLSGLPTSHRWYTVLDLKDAFFCLRLHPTSQPLFASEWRDPGMGISGQLTWTRLPQGFKNSPTLFNEALHRGLADFRIQHPDLILLQYVDDLLLAATSELDCQQGTRALLKTLGNLGYRASAKKAQICQKQVKYLGYLLREGQRWLTEARKETVMGQPTPKTPRQLREFLGTAGFCRLWIPRFAEMAAPLYPLTKPGTLFNWGPDQQKAYHEIKQALLTAPALGLPDLTKPFELFVDEKQGYAKGVLTQKLGPWRRPVAYLSKKLDPVAAGWPPCLRMVAAIAVLTKDAGKLTMGQPLVILAPHAVEALVKQPPDRWLSNARMTHYQAMLLDTDRVQFGPVVALNPATLLPLPEEGAPHDCLEILAETHGTEPDLTDQPIPDADHTWYTDGSSFLQEGQRKAGAAVTTETEVIWARALPAGTSAQRAELIALTQALKMAEGKRLNVYTDSRYAFATAHIHGEIYKRRGWLTSEGREIKNKSEILALLKALFLPKRLSIIHCLGHQKGDSAEARGNRLADQAAREAAIKTPPDTSTLLAGKRTADGSEFEKRTADGSEFESPKKKAKVE

SEQ ID NO: 7134 - protein, 2088 aa, synthetic construct
MPAAKRVKLDGGDKKYSIGLDIGTNSVGWAVITDEYKVPSKKFKVLGNTDRHSIKKNLIGALLFDSGETAEATRLKRTARRRYTRRKNRICYLQEIFSNEMAKVDDSFFHRLEESFLVEEDKKHERHPIFGNIVDEVAYHEKYPTIYHLRKKLVDSTDKADLRLIYLALAHMIKFRGHFLIEGDLNPDNSDVDKLFIQLVQTYNQLFEENPINASGVDAKAILSARLSKSRRLENLIAQLPGEKKNGLFGNLIALSLGLTPNFKSNFDLAEDAKLQLSKDTYDDDLDNLLAQIGDQYADLFLAAKNLSDAILLSDILRVNTEITKAPLSASMIKRYDEHHQDLTLLKALVRQQLPEKYKEIFFDQSKNGYAGYIDGGASQEEFYKFIKPILEKMDGTEELLVKLNREDLLRKQRTFDNGSIPHQIHLGELHAILRRQEDFYPFLKDNREKIEKILTFRIPYYVGPLARGNSRFAWMTRKSEETITPWNFEEVVDKGASAQSFIERMTNFDKNLPNEKVLPKHSLLYEYFTVYNELTKVKYVTEGMRKPAFLSGEQKKAIVDLLFKTNRKVTVKQLKEDYFKKIECFDSVEISGVEDRFNASLGTYHDLLKIIKDKDFLDNEENEDILEDIVLTLTLFEDREMIEERLKTYAHLFDDKVMKQLKRRRYTGWGRLSRKLINGIRDKQSGKTILDFLKSDGFANRNFMQLIHDDSLTFKEDIQKAQVSGQGDSLHEHIANLAGSPAIKKGILQTVKVVDELVKVMGRHKPENIVIEMARENQTTQKGQKNSRERMKRIEEGIKELGSQILKEHPVENTQLQNEKLYLYYLQNGRDMYVDQELDINRLSDYDVDHIVPQSFLKDDSIDNKVLTRSDKARGKSDNVPSEEVVKKMKNYWRQLLNAKLITQRKFDNLTKAERGGLSELDKAGFIKRQLVETRQITKHVAQILDSRMNTKYDENDKLIREVKVITLKSKLVSDFRKDFQFYKVREINNYHHAHDAYLNAVVGTALIKKYPKLESEFVYGDYKVYDVRKMIAKSEQEIGKATAKYFFYSNIMNFFKTEITLANGEIRKRPLIETNGETGEIVWDKGRDFATVRKVLSMPQVNIVKKTEVQTGGFSKESILPKRNSDKLIARKKDWDPKKYGGFDSPTVAYSVLVVAKVEKGKSKKLKSVKELLGITIMERSSFEKNPIDFLEAKGYKEVKKDLIIKLPKYSLFELENGRKRMLASAGELQKGNELALPSKYVNFLYLASHYEKLKGSPEDNEQKQLFVEQHKHYLDEIIEQISEFSKRVILADANLDKVLSAYNKHRDKPIREQAENIIHLFTLTNLGAPAAFKYFDTTIDRKRYTSTKEVLDATLIHQSITGLYETRIDLSQLGGDGGGGSGSSPAPGGTLQLDDEYRLYSPLVKPDQNIQFWLEQFPQAWAETAGMGLAKQVPPQVIQLKASATPVSVRQYPLSKEAQEGIRPHVQRLIQQGILVPVQSPWNTPLLPVRKPGTNDYRPVQDLREVNKRVQDIHPTVPNPYNLLCALPPQRSWYTVLDLKDAFFCLRLHPTSQPLFAFEWRDPGTGRTGQLTWTRLPQGFKNSPTIFDEALHRDLANFRIQHPQVTLLQYVDDLLLAGATKQDCLEGTKALLLELSDLGYRASAKKAQICRREVTYLGYSLRDGQRWLTEARKKTVVQIPAPTTAKQVREFLGTAGFCRLWIPGFATLAAPLYPLTKEKGEFSWAPEHQKAFDAIKKALLSAPALALPDVTKPFTLYVDERKGVARGVLTQTLGPWRRPVAYLSKKLDPVASGWPVCLKAIAAVAILVKDADKLTLGQNITVIAPHALENIVRQPPDRWMTNARMTHYQSLLLTERVTFAPPAALNPATLLPEETDEPVTHDCHQLLIEETGVRKDLTDIPLTGEVLTWFTDGSSYVVEGKRMAGAAVVDGTRTIWASSLPEGTSAQKAELMALTQALRLAEGKSINIYTDSRYAFATAHVHGAIYKQRGLLTSAGREIKNKEEILSLLEALHLPKRLAIIHCPGHQKAKDPISRGNQMADRVAKQAAQGVNLLAGKRTADGSEFEKRTADGSEFESPKKKAKVE

SEQ ID NO: 7135 - protein, 2092 aa, synthetic construct
MPAAKRVKLDGGDKKYSIGLDIGTNSVGWAVITDEYKVPSKKFKVLGNTDRHSIKKNLIGALLFDSGETAEATRLKRTARRRYTRRKNRICYLQEIFSNEMAKVDDSFFHRLEESFLVEEDKKHERHPIFGNIVDEVAYHEKYPTIYHLRKKLVDSTDKADLRLIYLALAHMIKFRGHFLIEGDLNPDNSDVDKLFIQLVQTYNQLFEENPINASGVDAKAILSARLSKSRRLENLIAQLPGEKKNGLFGNLIALSLGLTPNFKSNFDLAEDAKLQLSKDTYDDDLDNLLAQIGDQYADLFLAAKNLSDAILLSDILRVNTEITKAPLSASMIKRYDEHHQDLTLLKALVRQQLPEKYKEIFFDQSKNGYAGYIDGGASQEEFYKFIKPILEKMDGTEELLVKLNREDLLRKQRTFDNGSIPHQIHLGELHAILRRQEDFYPFLKDNREKIEKILTFRIPYYVGPLARGNSRFAWMTRKSEETITPWNFEEVVDKGASAQSFIERMTNFDKNLPNEKVLPKHSLLYEYFTVYNELTKVKYVTEGMRKPAFLSGEQKKAIVDLLFKTNRKVTVKQLKEDYFKKIECFDSVEISGVEDRFNASLGTYHDLLKIIKDKDFLDNEENEDILEDIVLTLTLFEDREMIEERLKTYAHLFDDKVMKQLKRRRYTGWGRLSRKLINGIRDKQSGKTILDFLKSDGFANRNFMQLIHDDSLTFKEDIQKAQVSGQGDSLHEHIANLAGSPAIKKGILQTVKVVDELVKVMGRHKPENIVIEMARENQTTQKGQKNSRERMKRIEEGIKELGSQILKEHPVENTQLQNEKLYLYYLQNGRDMYVDQELDINRLSDYDVDHIVPQSFLKDDSIDNKVLTRSDKARGKSDNVPSEEVVKKMKNYWRQLLNAKLITQRKFDNLTKAERGGLSELDKAGFIKRQLVETRQITKHVAQILDSRMNTKYDENDKLIREVKVITLKSKLVSDFRKDFQFYKVREINNYHHAHDAYLNAVVGTALIKKYPKLESEFVYGDYKVYDVRKMIAKSEQEIGKATAKYFFYSNIMNFFKTEITLANGEIRKRPLIETNGETGEIVWDKGRDFATVRKVLSMPQVNIVKKTEVQTGGFSKESILPKRNSDKLIARKKDWDPKKYGGFDSPTVAYSVLVVAKVEKGKSKKLKSVKELLGITIMERSSFEKNPIDFLEAKGYKEVKKDLIIKLPKYSLFELENGRKRMLASAGELQKGNELALPSKYVNFLYLASHYEKLKGSPEDNEQKQLFVEQHKHYLDEIIEQISEFSKRVILADANLDKVLSAYNKHRDKPIREQAENIIHLFTLTNLGAPAAFKYFDTTIDRKRYTSTKEVLDATLIHQSITGLYETRIDLSQLGGDGGGGSGSSPAPGGVLNLEEEYRLHEKPVPSSIDPSWLQLFPTVWAERAGMGLANQVPPVVVELRSGASPVAVRQYPMSKEAREGIRPHIQRFLDLGVLVPCQSPWNTPLLPVKKPGTNDYRPVQDLREINKRVQDIHPTVPNPYNLLSSLPPSHTWYSVLDLKDAFFCLKLHPNSQPLFAFEWRDPEKGNTGQLTWTRLPQGFKNSPTLFNEALHRDLAPFRALNPQVVLLQYVDDLLVAAPTYRDCKEGTQKLLQELSKLGYRVSAKKAQLCQKEVTYLGYLLKEGKRWLTPARKATVMKIPPPTTPRQVREFLGTAGFCRLWIPGFASLAAPLYPLTKPSIPFIWTEEHQKAFDRIKEALLSAPALALPDLTKPFTLYVDERAGVARGVLTQTLGPWRRPVAYLSKKLDPVASGWPTCLKAVAAVALLLKDADKLTLGQNVTVIASHSLESIVRQPPDRWMTNARMTHYQSLLLNERVSFAPPAVLNPATLLPVESEATPVHRCSEILAEETGTRRDLKDQPLPGVPAWYTDGSSFIAEGKRRAGAAIVDGKRTVWASSLPEGTSAQKAELVALTQALRLAEGKDINIYTDSRYAFATAHIHGAIYKQRGWLTSAGKDIKNKEEILALLEAIHLPKRVAIIHCPGHQKGNDPVATGNRRADEAAKQAALSTRVLAETTKPAGKRTADGSEFEKRTADGSEFESPKKKAKVE

SEQ ID NO: 7136 - protein, 2094 aa, synthetic construct
MPAAKRVKLDGGDKKYSIGLDIGTNSVGWAVITDEYKVPSKKFKVLGNTDRHSIKKNLIGALLFDSGETAEATRLKRTARRRYTRRKNRICYLQEIFSNEMAKVDDSFFHRLEESFLVEEDKKHERHPIFGNIVDEVAYHEKYPTIYHLRKKLVDSTDKADLRLIYLALAHMIKFRGHFLIEGDLNPDNSDVDKLFIQLVQTYNQLFEENPINASGVDAKAILSARLSKSRRLENLIAQLPGEKKNGLFGNLIALSLGLTPNFKSNFDLAEDAKLQLSKDTYDDDLDNLLAQIGDQYADLFLAAKNLSDAILLSDILRVNTEITKAPLSASMIKRYDEHHQDLTLLKALVRQQLPEKYKEIFFDQSKNGYAGYIDGGASQEEFYKFIKPILEKMDGTEELLVKLNREDLLRKQRTFDNGSIPHQIHLGELHAILRRQEDFYPFLKDNREKIEKILTFRIPYYVGPLARGNSRFAWMTRKSEETITPWNFEEVVDKGASAQSFIERMTNFDKNLPNEKVLPKHSLLYEYFTVYNELTKVKYVTEGMRKPAFLSGEQKKAIVDLLFKTNRKVTVKQLKEDYFKKIECFDSVEISGVEDRFNASLGTYHDLLKIIKDKDFLDNEENEDILEDIVLTLTLFEDREMIEERLKTYAHLFDDKVMKQLKRRRYTGWGRLSRKLINGIRDKQSGKTILDFLKSDGFANRNFMQLIHDDSLTFKEDIQKAQVSGQGDSLHEHIANLAGSPAIKKGILQTVKVVDELVKVMGRHKPENIVIEMARENQTTQKGQKNSRERMKRIEEGIKELGSQILKEHPVENTQLQNEKLYLYYLQNGRDMYVDQELDINRLSDYDVDHIVPQSFLKDDSIDNKVLTRSDKARGKSDNVPSEEVVKKMKNYWRQLLNAKLITQRKFDNLTKAERGGLSELDKAGFIKRQLVETRQITKHVAQILDSRMNTKYDENDKLIREVKVITLKSKLVSDFRKDFQFYKVREINNYHHAHDAYLNAVVGTALIKKYPKLESEFVYGDYKVYDVRKMIAKSEQEIGKATAKYFFYSNIMNFFKTEITLANGEIRKRPLIETNGETGEIVWDKGRDFATVRKVLSMPQVNIVKKTEVQTGGFSKESILPKRNSDKLIARKKDWDPKKYGGFDSPTVAYSVLVVAKVEKGKSKKLKSVKELLGITIMERSSFEKNPIDFLEAKGYKEVKKDLIIKLPKYSLFELENGRKRMLASAGELQKGNELALPSKYVNFLYLASHYEKLKGSPEDNEQKQLFVEQHKHYLDEIIEQISEFSKRVILADANLDKVLSAYNKHRDKPIREQAENIIHLFTLTNLGAPAAFKYFDTTIDRKRYTSTKEVLDATLIHQSITGLYETRIDLSQLGGDGGGGSGSSPAPGGTLNIEDEYRLHETSKEPDVPLGSTWLSDFPQAWAETGGMGLAVRQAPLIIPLKATSTPVSIKQYPMSQEARLGIKPHIQRLLDQGILVPCQSPWNTPLLPVKKPGTNDYRPVQDLREVNKRVEDIHPTVPNPYNLLSGLPPSHQWYTVLDLKDAFFCLRLHPTSQPLFAFEWRDPEMGISGQLTWTRLPQGFKNSPTLFDEALHRDLADFRIQHPDLILLQYVDDLLLAATSEQDCQRGTRALLQTLGNLGYRASAKKAQICQKQVKYLGYLLKEGQRWLTEARKETVMGQPTPKTPRQLREFLGTAGFCRLWIPGFAEMAAPLYPLTKTGTLFNWGPDQQKAYQEIKQALLTAPALGLPDLTKPFELFVDEKQGYAKGVLTQKLGPWRRPVAYLSKKLDPVAAGWPPCLRMVAAIAVLTKDAGKLTMGQPLVILAPHAVEALVKQPPDRWLSNARMTHYQAMLLDTDRVQFGPVVALNPATLLPLPEKEAPHDCLEILAETHGTRPDLTDQPIPDADYTWYTDGSSFLQEGQRRAGAAVTTETEVIWARALPAGTSAQRAELIALTQALKMAEGKKLNVYTDSRYAFATAHVHGEIYRRRGLLTSEGREIKNKNEILALLKALFLPKRLSIIHCPGHQKGNSAEARGNRMADQAAREAAMKAVLETSTLLAGKRTADGSEFEKRTADGSEFESPKKKAKVE

SEQ ID NO: 7137 - protein, 2094 aa, synthetic construct
MPAAKRVKLDGGDKKYSIGLDIGTNSVGWAVITDEYKVPSKKFKVLGNTDRHSIKKNLIGALLFDSGETAEATRLKRTARRRYTRRKNRICYLQEIFSNEMAKVDDSFFHRLEESFLVEEDKKHERHPIFGNIVDEVAYHEKYPTIYHLRKKLVDSTDKADLRLIYLALAHMIKFRGHFLIEGDLNPDNSDVDKLFIQLVQTYNQLFEENPINASGVDAKAILSARLSKSRRLENLIAQLPGEKKNGLFGNLIALSLGLTPNFKSNFDLAEDAKLQLSKDTYDDDLDNLLAQIGDQYADLFLAAKNLSDAILLSDILRVNTEITKAPLSASMIKRYDEHHQDLTLLKALVRQQLPEKYKEIFFDQSKNGYAGYIDGGASQEEFYKFIKPILEKMDGTEELLVKLNREDLLRKQRTFDNGSIPHQIHLGELHAILRRQEDFYPFLKDNREKIEKILTFRIPYYVGPLARGNSRFAWMTRKSEETITPWNFEEVVDKGASAQSFIERMTNFDKNLPNEKVLPKHSLLYEYFTVYNELTKVKYVTEGMRKPAFLSGEQKKAIVDLLFKTNRKVTVKQLKEDYFKKIECFDSVEISGVEDRFNASLGTYHDLLKIIKDKDFLDNEENEDILEDIVLTLTLFEDREMIEERLKTYAHLFDDKVMKQLKRRRYTGWGRLSRKLINGIRDKQSGKTILDFLKSDGFANRNFMQLIHDDSLTFKEDIQKAQVSGQGDSLHEHIANLAGSPAIKKGILQTVKVVDELVKVMGRHKPENIVIEMARENQTTQKGQKNSRERMKRIEEGIKELGSQILKEHPVENTQLQNEKLYLYYLQNGRDMYVDQELDINRLSDYDVDHIVPQSFLKDDSIDNKVLTRSDKARGKSDNVPSEEVVKKMKNYWRQLLNAKLITQRKFDNLTKAERGGLSELDKAGFIKRQLVETRQITKHVAQILDSRMNTKYDENDKLIREVKVITLKSKLVSDFRKDFQFYKVREINNYHHAHDAYLNAVVGTALIKKYPKLESEFVYGDYKVYDVRKMIAKSEQEIGKATAKYFFYSNIMNFFKTEITLANGEIRKRPLIETNGETGEIVWDKGRDFATVRKVLSMPQVNIVKKTEVQTGGFSKESILPKRNSDKLIARKKDWDPKKYGGFDSPTVAYSVLVVAKVEKGKSKKLKSVKELLGITIMERSSFEKNPIDFLEAKGYKEVKKDLIIKLPKYSLFELENGRKRMLASAGELQKGNELALPSKYVNFLYLASHYEKLKGSPEDNEQKQLFVEQHKHYLDEIIEQISEFSKRVILADANLDKVLSAYNKHRDKPIREQAENIIHLFTLTNLGAPAAFKYFDTTIDRKRYTSTKEVLDATLIHQSITGLYETRIDLSQLGGDGGGGSGSSPAPGGTLNIEDEYRLHETSKEPDVPLGSTWLSDFPQAWAETGGMGLAVRQAPLIIPLKATSTPVSIKQYPMSQEARLGIKPHIQRLLDQGILVPCQSPWNTPLLPVKKPGTNDYRPVQDLREVNKRVEDIHPTVPNPYNLLSGLPPSHQWYTVLDLKDAFFCLRLHPTSQPLFAFEWRDPEMGISGQLTWTRLPQGFKNSPTLFNEALHRDLADFRIQHPDLILLQYVDDLLLAATSEQDCQRGTRALLQTLGNLGYRASAKKAQICQKQVKYLGYLLKEGQRWLTEARKETVMGQPTPKTPRQLREFLGTAGFCRLWIPGFAEMAAPLYPLTKPGTLFNWGPDQQKAYQEIKQALLTAPALGLPDLTKPFELFVDEKQGYAKGVLTQKLGPWRRPVAYLSKKLDPVAAGWPPCLRMVAAIAVLTKDAGKLTMGQPLVILAPHAVEALVKQPPDRWLSNARMTHYQAMLLDTDRVQFGPVVALNPATLLPLPEKEAPHDCLEILAETHGTRPDLTDQPIPDADYTWYTDGSSFLQEGQRRAGAAVTTETEVIWARALPAGTSAQRAELIALTQALKMAEGKKLNVYTDSRYAFATAHVHGEIYRRRGWLTSEGREIKNKNEILALLKALFLPKRLSIIHCPGHQKGNSAEARGNRMADQAAREAAMKAVLETSTLLAGKRTADGSEFEKRTADGSEFESPKKKAKVE

SEQ ID NO: 7138 - protein, 2093 aa, synthetic construct
MPAAKRVKLDGGDKKYSIGLDIGTNSVGWAVITDEYKVPSKKFKVLGNTDRHSIKKNLIGALLFDSGETAEATRLKRTARRRYTRRKNRICYLQEIFSNEMAKVDDSFFHRLEESFLVEEDKKHERHPIFGNIVDEVAYHEKYPTIYHLRKKLVDSTDKADLRLIYLALAHMIKFRGHFLIEGDLNPDNSDVDKLFIQLVQTYNQLFEENPINASGVDAKAILSARLSKSRRLENLIAQLPGEKKNGLFGNLIALSLGLTPNFKSNFDLAEDAKLQLSKDTYDDDLDNLLAQIGDQYADLFLAAKNLSDAILLSDILRVNTEITKAPLSASMIKRYDEHHQDLTLLKALVRQQLPEKYKEIFFDQSKNGYAGYIDGGASQEEFYKFIKPILEKMDGTEELLVKLNREDLLRKQRTFDNGSIPHQIHLGELHAILRRQEDFYPFLKDNREKIEKILTFRIPYYVGPLARGNSRFAWMTRKSEETITPWNFEEVVDKGASAQSFIERMTNFDKNLPNEKVLPKHSLLYEYFTVYNELTKVKYVTEGMRKPAFLSGEQKKAIVDLLFKTNRKVTVKQLKEDYFKKIECFDSVEISGVEDRFNASLGTYHDLLKIIKDKDFLDNEENEDILEDIVLTLTLFEDREMIEERLKTYAHLFDDKVMKQLKRRRYTGWGRLSRKLINGIRDKQSGKTILDFLKSDGFANRNFMQLIHDDSLTFKEDIQKAQVSGQGDSLHEHIANLAGSPAIKKGILQTVKVVDELVKVMGRHKPENIVIEMARENQTTQKGQKNSRERMKRIEEGIKELGSQILKEHPVENTQLQNEKLYLYYLQNGRDMYVDQELDINRLSDYDVDHIVPQSFLKDDSIDNKVLTRSDKARGKSDNVPSEEVVKKMKNYWRQLLNAKLITQRKFDNLTKAERGGLSELDKAGFIKRQLVETRQITKHVAQILDSRMNTKYDENDKLIREVKVITLKSKLVSDFRKDFQFYKVREINNYHHAHDAYLNAVVGTALIKKYPKLESEFVYGDYKVYDVRKMIAKSEQEIGKATAKYFFYSNIMNFFKTEITLANGEIRKRPLIETNGETGEIVWDKGRDFATVRKVLSMPQVNIVKKTEVQTGGFSKESILPKRNSDKLIARKKDWDPKKYGGFDSPTVAYSVLVVAKVEKGKSKKLKSVKELLGITIMERSSFEKNPIDFLEAKGYKEVKKDLIIKLPKYSLFELENGRKRMLASAGELQKGNELALPSKYVNFLYLASHYEKLKGSPEDNEQKQLFVEQHKHYLDEIIEQISEFSKRVILADANLDKVLSAYNKHRDKPIREQAENIIHLFTLTNLGAPAAFKYFDTTIDRKRYTSTKEVLDATLIHQSITGLYETRIDLSQLGGDGGGGSPAPGSSGGTLQLEEEYRLFEPESTQKQEMDIWLKNFPQAWAETGGMGTAHCQAPVLIQLKATATPISIRQYPMPHEAYQGIKPHIRRMLDQGILKPCQSPWNTPLLPVKKPGTEDYRPVQDLREVNKRVEDIHPTVPNPYNLLSTLPPSHPWYTVLDLKDAFFCLRLHSESQLLFAFEWRDPEIGLSGQLTWTRLPQGFKNSPTLFNEALHSDLADFRVRYPALVLLQYVDDLLLAAATRTECLEGTKALLETLGNKGYRASAKKAQICLQEVTYLGYSLKDGQRWLTKARKEAILSIPVPKNSRQVREFLGTAGYCRLWIPGFAELAAPLYPLTRPGTLFQWGTEQQLAFEDIKKALLSSPALGLPDITKPFELFIDENSGFAKGVLVQKLGPWKRPVAYLSKKLDTVASGWPPCLRMVAAIAILVKDAGKLTLGQPLTILTSHPVEALVRQPPNKWLSNARMTHYQAMLLDAERVHFGPTVSLNPATLLPLPSGGNHHDCLQILAETHGTRPDLTDQPLPDADLTWYTDGSSFIRNGEREAGAAVTTESEVIWAAPLPPGTSAQRAELIALTQALKMAEGKKLTVYTDSRYAFATTHVHGEIYRRRGWLTSEGKEIKNKNEILALLEALFLPKRLSIIHCPGHQKGDSPQAKGNRLADDTAKKAATETHSSLTVLPAGKRTADGSEFEKRTADGSEFESPKKKAKVE

SEQ ID NO: 7139 - protein, 2094 aa, synthetic construct
MPAAKRVKLDGGDKKYSIGLDIGTNSVGWAVITDEYKVPSKKFKVLGNTDRHSIKKNLIGALLFDSGETAEATRLKRTARRRYTRRKNRICYLQEIFSNEMAKVDDSFFHRLEESFLVEEDKKHERHPIFGNIVDEVAYHEKYPTIYHLRKKLVDSTDKADLRLIYLALAHMIKFRGHFLIEGDLNPDNSDVDKLFIQLVQTYNQLFEENPINASGVDAKAILSARLSKSRRLENLIAQLPGEKKNGLFGNLIALSLGLTPNFKSNFDLAEDAKLQLSKDTYDDDLDNLLAQIGDQYADLFLAAKNLSDAILLSDILRVNTEITKAPLSASMIKRYDEHHQDLTLLKALVRQQLPEKYKEIFFDQSKNGYAGYIDGGASQEEFYKFIKPILEKMDGTEELLVKLNREDLLRKQRTFDNGSIPHQIHLGELHAILRRQEDFYPFLKDNREKIEKILTFRIPYYVGPLARGNSRFAWMTRKSEETITPWNFEEVVDKGASAQSFIERMTNFDKNLPNEKVLPKHSLLYEYFTVYNELTKVKYVTEGMRKPAFLSGEQKKAIVDLLFKTNRKVTVKQLKEDYFKKIECFDSVEISGVEDRFNASLGTYHDLLKIIKDKDFLDNEENEDILEDIVLTLTLFEDREMIEERLKTYAHLFDDKVMKQLKRRRYTGWGRLSRKLINGIRDKQSGKTILDFLKSDGFANRNFMQLIHDDSLTFKEDIQKAQVSGQGDSLHEHIANLAGSPAIKKGILQTVKVVDELVKVMGRHKPENIVIEMARENQTTQKGQKNSRERMKRIEEGIKELGSQILKEHPVENTQLQNEKLYLYYLQNGRDMYVDQELDINRLSDYDVDHIVPQSFLKDDSIDNKVLTRSDKARGKSDNVPSEEVVKKMKNYWRQLLNAKLITQRKFDNLTKAERGGLSELDKAGFIKRQLVETRQITKHVAQILDSRMNTKYDENDKLIREVKVITLKSKLVSDFRKDFQFYKVREINNYHHAHDAYLNAVVGTALIKKYPKLESEFVYGDYKVYDVRKMIAKSEQEIGKATAKYFFYSNIMNFFKTEITLANGEIRKRPLIETNGETGEIVWDKGRDFATVRKVLSMPQVNIVKKTEVQTGGFSKESILPKRNSDKLIARKKDWDPKKYGGFDSPTVAYSVLVVAKVEKGKSKKLKSVKELLGITIMERSSFEKNPIDFLEAKGYKEVKKDLIIKLPKYSLFELENGRKRMLASAGELQKGNELALPSKYVNFLYLASHYEKLKGSPEDNEQKQLFVEQHKHYLDEIIEQISEFSKRVILADANLDKVLSAYNKHRDKPIREQAENIIHLFTLTNLGAPAAFKYFDTTIDRKRYTSTKEVLDATLIHQSITGLYETRIDLSQLGGDGGGGSPAPGSSGGTLNLEDEYRLYETSAEPEVSPGSTWLSDFPQAWAETGGMGLAVRQAPLIIPLKATSTPVSIKQYPMSQEAKLGIKPHIQRLLDQGILVPCQSPWNTPLLPVKKPGTNDYRPVQDLREVNKRVEDIHPTVPNPYNLLSGLPPSHRWYTVLDLKDAFFCLRLHPTSQPLFAFEWRDPGMGISGQLTWTRLPQGFKNSPTLFNEALHRDLADFRIQHPDLILLQYVDDILLAATSELDCQQGTRALLLTLGNLGYRASAKKAQLCQKQVKYLGYLLKEGQRWLTEARKETVMGQPTPKTPRQLREFLGTAGFCRLWIPGFAEMAAPLYPLTKPGTLFNWGPDQQKAYQEIKQALLTAPALGLPDLTKPFELFVDEKQGYAKGVLTQKLGPWRRPVAYLSKKLDPVAAGWPPCLRMVAAIAVLRKDAGKLTMGQPLVILAPHAVEALVKQPPDRWLSNARMTHYQAMLLDTDRVQFGPVVALNPATLLPLPEEGAPHDCLEILAETHGTRPDLTDQPIPDADHTWYTDGSSFLQEGQRKAGAAVTTETEVIWARALPAGTSAQRAELIALTQALKMAEGKRLNVYTDSRYAFATAHIHGEIYRRRGWLTSEGREIKNKSEILALLKALFLPKRLSIIHCLGHQKGDSAEARGNRLADQAAREAAIKTPPDTSTLLAGKRTADGSEFEKRTADGSEFESPKKKAKVE

SEQ ID NO: 7140 - protein, 2094 aa, synthetic construct
MPAAKRVKLDGGDKKYSIGLDIGTNSVGWAVITDEYKVPSKKFKVLGNTDRHSIKKNLIGALLFDSGETAEATRLKRTARRRYTRRKNRICYLQEIFSNEMAKVDDSFFHRLEESFLVEEDKKHERHPIFGNIVDEVAYHEKYPTIYHLRKKLVDSTDKADLRLIYLALAHMIKFRGHFLIEGDLNPDNSDVDKLFIQLVQTYNQLFEENPINASGVDAKAILSARLSKSRRLENLIAQLPGEKKNGLFGNLIALSLGLTPNFKSNFDLAEDAKLQLSKDTYDDDLDNLLAQIGDQYADLFLAAKNLSDAILLSDILRVNTEITKAPLSASMIKRYDEHHQDLTLLKALVRQQLPEKYKEIFFDQSKNGYAGYIDGGASQEEFYKFIKPILEKMDGTEELLVKLNREDLLRKQRTFDNGSIPHQIHLGELHAILRRQEDFYPFLKDNREKIEKILTFRIPYYVGPLARGNSRFAWMTRKSEETITPWNFEEVVDKGASAQSFIERMTNFDKNLPNEKVLPKHSLLYEYFTVYNELTKVKYVTEGMRKPAFLSGEQKKAIVDLLFKTNRKVTVKQLKEDYFKKIECFDSVEISGVEDRFNASLGTYHDLLKIIKDKDFLDNEENEDILEDIVLTLTLFEDREMIEERLKTYAHLFDDKVMKQLKRRRYTGWGRLSRKLINGIRDKQSGKTILDFLKSDGFANRNFMQLIHDDSLTFKEDIQKAQVSGQGDSLHEHIANLAGSPAIKKGILQTVKVVDELVKVMGRHKPENIVIEMARENQTTQKGQKNSRERMKRIEEGIKELGSQILKEHPVENTQLQNEKLYLYYLQNGRDMYVDQELDINRLSDYDVDHIVPQSFLKDDSIDNKVLTRSDKARGKSDNVPSEEVVKKMKNYWRQLLNAKLITQRKFDNLTKAERGGLSELDKAGFIKRQLVETRQITKHVAQILDSRMNTKYDENDKLIREVKVITLKSKLVSDFRKDFQFYKVREINNYHHAHDAYLNAVVGTALIKKYPKLESEFVYGDYKVYDVRKMIAKSEQEIGKATAKYFFYSNIMNFFKTEITLANGEIRKRPLIETNGETGEIVWDKGRDFATVRKVLSMPQVNIVKKTEVQTGGFSKESILPKRNSDKLIARKKDWDPKKYGGFDSPTVAYSVLVVAKVEKGKSKKLKSVKELLGITIMERSSFEKNPIDFLEAKGYKEVKKDLIIKLPKYSLFELENGRKRMLASAGELQKGNELALPSKYVNFLYLASHYEKLKGSPEDNEQKQLFVEQHKHYLDEIIEQISEFSKRVILADANLDKVLSAYNKHRDKPIREQAENIIHLFTLTNLGAPAAFKYFDTTIDRKRYTSTKEVLDATLIHQSITGLYETRIDLSQLGGDGGGGSPAPGSSGGTLNIEDEYRLHETSKGPDVPLGSTWLSDFPQAWAETGGMGLAVRQAPLIIPLKATSTPVSIKQYPMSQEARLGIKPHIQRLLDQGILVPCQSPWNTPLLPVKKPGTNDYRPVQDLREVNKRVEDIHPTVPNPYNLLSGLPPSHQWYTVLDLKDAFFCLRLHPTSQSLFAFEWRDPEMGISGQLTWTRLPQGFKNSPTLFNEALHRDLADFRIQHPDLILLQYVDDLLLAATSELDCQQGTRALLQTLGDLGYRASAKKAQICQKQVKYLGYLLKEGQRWLTEARKETVMGQPTPKTPRQLREFLGTAGFCRLWIPGFAEMAAPLYPLTKPGTLFEWGPDQQKAYQEIKQALLTAPALGLPDLTKPFELFVDEKQGYAKGVLTQKLGPWRRPVAYLSKKLDPVAAGWPPCLRMVAAIAVLTKDAGKLTMGQPLVILAPHAVEALVKQPPDRWLSNARMTHYQALLLDTDRVQFGPIVALNPATLLPLPEEGLQHDCLDILAEAHGTRPDLTDQPLPDADHTWYTDGSSFLQEGQRKAGAAVTTETEVVWAKALPAGTSAQRAELIALTQALKMAEGKKLNVYTDSRYAFATAHIHGEIYRRRGWLTSEGKEIKNKDEILALLKALFLPKRLSIIHCPGHQKGNRAEARGNRMADQAAREVATRETPETSTLLAGKRTADGSEFEKRTADGSEFESPKKKAKVE

SEQ ID NO: 7141 - protein, 2092 aa, synthetic construct
MPAAKRVKLDGGDKKYSIGLDIGTNSVGWAVITDEYKVPSKKFKVLGNTDRHSIKKNLIGALLFDSGETAEATRLKRTARRRYTRRKNRICYLQEIFSNEMAKVDDSFFHRLEESFLVEEDKKHERHPIFGNIVDEVAYHEKYPTIYHLRKKLVDSTDKADLRLIYLALAHMIKFRGHFLIEGDLNPDNSDVDKLFIQLVQTYNQLFEENPINASGVDAKAILSARLSKSRRLENLIAQLPGEKKNGLFGNLIALSLGLTPNFKSNFDLAEDAKLQLSKDTYDDDLDNLLAQIGDQYADLFLAAKNLSDAILLSDILRVNTEITKAPLSASMIKRYDEHHQDLTLLKALVRQQLPEKYKEIFFDQSKNGYAGYIDGGASQEEFYKFIKPILEKMDGTEELLVKLNREDLLRKQRTFDNGSIPHQIHLGELHAILRRQEDFYPFLKDNREKIEKILTFRIPYYVGPLARGNSRFAWMTRKSEETITPWNFEEVVDKGASAQSFIERMTNFDKNLPNEKVLPKHSLLYEYFTVYNELTKVKYVTEGMRKPAFLSGEQKKAIVDLLFKTNRKVTVKQLKEDYFKKIECFDSVEISGVEDRFNASLGTYHDLLKIIKDKDFLDNEENEDILEDIVLTLTLFEDREMIEERLKTYAHLFDDKVMKQLKRRRYTGWGRLSRKLINGIRDKQSGKTILDFLKSDGFANRNFMQLIHDDSLTFKEDIQKAQVSGQGDSLHEHIANLAGSPAIKKGILQTVKVVDELVKVMGRHKPENIVIEMARENQTTQKGQKNSRERMKRIEEGIKELGSQILKEHPVENTQLQNEKLYLYYLQNGRDMYVDQELDINRLSDYDVDHIVPQSFLKDDSIDNKVLTRSDKARGKSDNVPSEEVVKKMKNYWRQLLNAKLITQRKFDNLTKAERGGLSELDKAGFIKRQLVETRQITKHVAQILDSRMNTKYDENDKLIREVKVITLKSKLVSDFRKDFQFYKVREINNYHHAHDAYLNAVVGTALIKKYPKLESEFVYGDYKVYDVRKMIAKSEQEIGKATAKYFFYSNIMNFFKTEITLANGEIRKRPLIETNGETGEIVWDKGRDFATVRKVLSMPQVNIVKKTEVQTGGFSKESILPKRNSDKLIARKKDWDPKKYGGFDSPTVAYSVLVVAKVEKGKSKKLKSVKELLGITIMERSSFEKNPIDFLEAKGYKEVKKDLIIKLPKYSLFELENGRKRMLASAGELQKGNELALPSKYVNFLYLASHYEKLKGSPEDNEQKQLFVEQHKHYLDEIIEQISEFSKRVILADANLDKVLSAYNKHRDKPIREQAENIIHLFTLTNLGAPAAFKYFDTTIDRKRYTSTKEVLDATLIHQSITGLYETRIDLSQLGGDGGGGSPAPGSSGGVLNLEEEYRLHEKPVPSSIDPSWLQLFPTVWAERAGMGLANQVPPVVVELRSGASPVAVRQYPMSKEAREGIRPHIQRFLDLGVLVPCQSPWNTPLLPVKKPGTNDYRPVQDLREINKRVQDIHPTVPNPYNLLSSLPPSHTWYSVLDLKDAFFCLKLHPNSQPLFAFEWRDPEKGNTGQLTWTRLPQGFKNSPTLFNEALHRDLAPFRALNPQVVLLQYVDDLLVAAPTYRDCKEGTQKLLQELSKLGYRVSAKKAQLCQKEVTYLGYLLKEGKRWLTPARKATVMKIPPPTTPRQVREFLGTAGFCRLWIPGFASLAAPLYPLTKPSIPFIWTEEHQKAFDRIKEALLSAPALALPDLTKPFTLYVDERAGVARGVLTQTLGPWRRPVAYLSKKLDPVASGWPTCLKAVAAVALLLKDADKLTLGQNVTVIASHSLESIVRQPPDRWMTNARMTHYQSLLLNERVSFAPPAVLNPATLLPVESEATPVHRCSEILAEETGTRRDLKDQPLPGVPAWYTDGSSFIAEGKRRAGAAIVDGKRTVWASSLPEGTSAQKAELVALTQALRLAEGKDINIYTDSRYAFATAHIHGAIYKQRGWLTSAGKDIKNKEEILALLEAIHLPKRVAIIHCPGHQKGNDPVATGNRRADEAAKQAALSTRVLAETTKPAGKRTADGSEFEKRTADGSEFESPKKKAKVE

SEQ ID NO: 7142 - protein, 2094 aa, synthetic construct; identical to SEQ ID NO: 4525

SEQ ID NO: 7143 - protein, 2096 aa, synthetic construct
MPAAKRVKLDGGDKKYSIGLDIGTNSVGWAVITDEYKVPSKKFKVLGNTDRHSIKKNLIGALLFDSGETAEATRLKRTARRRYTRRKNRICYLQEIFSNEMAKVDDSFFHRLEESFLVEEDKKHERHPIFGNIVDEVAYHEKYPTIYHLRKKLVDSTDKADLRLIYLALAHMIKFRGHFLIEGDLNPDNSDVDKLFIQLVQTYNQLFEENPINASGVDAKAILSARLSKSRRLENLIAQLPGEKKNGLFGNLIALSLGLTPNFKSNFDLAEDAKLQLSKDTYDDDLDNLLAQIGDQYADLFLAAKNLSDAILLSDILRVNTEITKAPLSASMIKRYDEHHQDLTLLKALVRQQLPEKYKEIFFDQSKNGYAGYIDGGASQEEFYKFIKPILEKMDGTEELLVKLNREDLLRKQRTFDNGSIPHQIHLGELHAILRRQEDFYPFLKDNREKIEKILTFRIPYYVGPLARGNSRFAWMTRKSEETITPWNFEEVVDKGASAQSFIERMTNFDKNLPNEKVLPKHSLLYEYFTVYNELTKVKYVTEGMRKPAFLSGEQKKAIVDLLFKTNRKVTVKQLKEDYFKKIECFDSVEISGVEDRFNASLGTYHDLLKIIKDKDFLDNEENEDILEDIVLTLTLFEDREMIEERLKTYAHLFDDKVMKQLKRRRYTGWGRLSRKLINGIRDKQSGKTILDFLKSDGFANRNFMQLIHDDSLTFKEDIQKAQVSGQGDSLHEHIANLAGSPAIKKGILQTVKVVDELVKVMGRHKPENIVIEMARENQTTQKGQKNSRERMKRIEEGIKELGSQILKEHPVENTQLQNEKLYLYYLQNGRDMYVDQELDINRLSDYDVDHIVPQSFLKDDSIDNKVLTRSDKARGKSDNVPSEEVVKKMKNYWRQLLNAKLITQRKFDNLTKAERGGLSELDKAGFIKRQLVETRQITKHVAQILDSRMNTKYDENDKLIREVKVITLKSKLVSDFRKDFQFYKVREINNYHHAHDAYLNAVVGTALIKKYPKLESEFVYGDYKVYDVRKMIAKSEQEIGKATAKYFFYSNIMNFFKTEITLANGEIRKRPLIETNGETGEIVWDKGRDFATVRKVLSMPQVNIVKKTEVQTGGFSKESILPKRNSDKLIARKKDWDPKKYGGFDSPTVAYSVLVVAKVEKGKSKKLKSVKELLGITIMERSSFEKNPIDFLEAKGYKEVKKDLIIKLPKYSLFELENGRKRMLASAGELQKGNELALPSKYVNFLYLASHYEKLKGSPEDNEQKQLFVEQHKHYLDEIIEQISEFSKRVILADANLDKVLSAYNKHRDKPIREQAENIIHLFTLTNLGAPAAFKYFDTTIDRKRYTSTKEVLDATLIHQSITGLYETRIDLSQLGGDGGGSSGGSPAPGGTAPLEEEYRLFLEAPIQNVTLLEQWKREIPKVWAEINPPGLASTQAPIHVQLLSTALPVRVRQYPITLEAKRSLRETIRKFRAAGILRPVHSPWNTPLLPVRKSGTSEYRMVQDLREVNKRVETIHPTVPNPYTLLSLLPPDRIWYSVLDLKDAFFCIPLAPESQLIFAFEWADAEEGESGQLTWTRLPQGFKNSPTLFNEALNRDLQGFRLDHPSVSLLQYVDDLLIAADTQAACLSATRDLLMTLAELGYRVSGKKAQLCQEEVTYLGFKIHKGSRSLSNSRTQAILQIPVPKTKRQVREFLGKIGYCRLFIPGFAELAQPLYAATRPGNDPLVWGEKEEEAFQSLKLALTQPPALALPSLDKPFQLFVEETSGAAKGVLTQALGPWKRPVAYLSKRLDPVAAGWPRCLRAIAAAALLTREASKLTFGQDIEITSSHNLESLLRSPPDKWLTNARITQYQVLLLDPPRVRFKQTAALNPATLLPETDDTLPIHHCLDTLDSLTSTRPDLTDQPLAQAEATLFTDGSSYIRDGKRYAGAAVVTLDSVIWAEPLPIGTSAQKAELIALTKALEWSKDKSVNIYTDSRYAFATLHVHGMIYRERGWLTAGGKAIKNAPEILALLTAVWLPKRVAVMHCKGHQKDDAPTSTGNRRADEVAREVAIRPLSTQATISAGKRTADGSEFEKRTADGSEFESPKKKAKVE

SEQ ID NO: 7144 - protein, 2093 aa, synthetic construct
MPAAKRVKLDGGDKKYSIGLDIGTNSVGWAVITDEYKVPSKKFKVLGNTDRHSIKKNLIGALLFDSGETAEATRLKRTARRRYTRRKNRICYLQEIFSNEMAKVDDSFFHRLEESFLVEEDKKHERHPIFGNIVDEVAYHEKYPTIYHLRKKLVDSTDKADLRLIYLALAHMIKFRGHFLIEGDLNPDNSDVDKLFIQLVQTYNQLFEENPINASGVDAKAILSARLSKSRRLENLIAQLPGEKKNGLFGNLIALSLGLTPNFKSNFDLAEDAKLQLSKDTYDDDLDNLLAQIGDQYADLFLAAKNLSDAILLSDILRVNTEITKAPLSASMIKRYDEHHQDLTLLKALVRQQLPEKYKEIFFDQSKNGYAGYIDGGASQEEFYKFIKPILEKMDGTEELLVKLNREDLLRKQRTFDNGSIPHQIHLGELHAILRRQEDFYPFLKDNREKIEKILTFRIPYYVGPLARGNSRFAWMTRKSEETITPWNFEEVVDKGASAQSFIERMTNFDKNLPNEKVLPKHSLLYEYFTVYNELTKVKYVTEGMRKPAFLSGEQKKAIVDLLFKTNRKVTVKQLKEDYFKKIECFDSVEISGVEDRFNASLGTYHDLLKIIKDKDFLDNEENEDILEDIVLTLTLFEDREMIEERLKTYAHLFDDKVMKQLKRRRYTGWGRLSRKLINGIRDKQSGKTILDFLKSDGFANRNFMQLIHDDSLTFKEDIQKAQVSGQGDSLHEHIANLAGSPAIKKGILQTVKVVDELVKVMGRHKPENIVIEMARENQTTQKGQKNSRERMKRIEEGIKELGSQILKEHPVENTQLQNEKLYLYYLQNGRDMYVDQELDINRLSDYDVDHIVPQSFLKDDSIDNKVLTRSDKARGKSDNVPSEEVVKKMKNYWRQLLNAKLITQRKFDNLTKAERGGLSELDKAGFIKRQLVETRQITKHVAQILDSRMNTKYDENDKLIREVKVITLKSKLVSDFRKDFQFYKVREINNYHHAHDAYLNAVVGTALIKKYPKLESEFVYGDYKVYDVRKMIAKSEQEIGKATAKYFFYSNIMNFFKTEITLANGEIRKRPLIETNGETGEIVWDKGRDFATVRKVLSMPQVNIVKKTEVQTGGFSKESILPKRNSDKLIARKKDWDPKKYGGFDSPTVAYSVLVVAKVEKGKSKKLKSVKELLGITIMERSSFEKNPIDFLEAKGYKEVKKDLIIKLPKYSLFELENGRKRMLASAGELQKGNELALPSKYVNFLYLASHYEKLKGSPEDNEQKQLFVEQHKHYLDEIIEQISEFSKRVILADANLDKVLSAYNKHRDKPIREQAENIIHLFTLTNLGAPAAFKYFDTTIDRKRYTSTKEVLDATLIHQSITGLYETRIDLSQLGGDGGGSSGGSPAPGGTLQLEEEYRLFEPESTQKQEMDIWLKNFPQAWAETGGMGTAHCQAPVLIQLKATATPISIRQYPMPHEAYQGIKPHIRRMLDQGILKPCQSPWNTPLLPVKKPGTEDYRPVQDLREVNKRVEDIHPTVPNPYNLLSTLPPSHPWYTVLDLKDAFFCLRLHSESQLLFAFEWRDPEIGLSGQLTWTRLPQGFKNSPTLFNEALHSDLADFRVRYPALVLLQYVDDLLLAAATRTECLEGTKALLETLGNKGYRASAKKAQICLQEVTYLGYSLKDGQRWLTKARKEAILSIPVPKNSRQVREFLGKAGYCRLFIPGFAELAAPLYPLTRPGTLFQWGTEQQLAFEDIKKALLSSPALGLPDITKPFELFIDENSGFAKGVLVQKLGPWKRPVAYLSKKLDTVASGWPPCLRMVAAIAILVKDAGKLTLGQPLTILTSHPVEALVRQPPNKWLSNARMTHYQAMLLDAERVHFGPTVSLNPATLLPLPSGGNHHDCLQILAETHGTRPDLTDQPLPDADLTWYTDGSSFIRNGEREAGAAVTTESEVIWAAPLPPGTSAQRAELIALTQALKMAEGKKLTVYTDSRYAFATTHVHGEIYRRRGWLTSEGKEIKNKNEILALLEALFLPKRLSIIHCPGHQKGDSPQAKGNRLADDTAKKAATETHSSLTVLPAGKRTADGSEFEKRTADGSEFESPKKKAKVE

SEQ ID NO: 7145 - protein, 2174 aa, synthetic construct
MPAAKRVKLDGGDKKYSIGLDIGTNSVGWAVITDEYKVPSKKFKVLGNTDRHSIKKNLIGALLFDSGETAEATRLKRTARRRYTRRKNRICYLQEIFSNEMAKVDDSFFHRLEESFLVEEDKKHERHPIFGNIVDEVAYHEKYPTIYHLRKKLVDSTDKADLRLIYLALAHMIKFRGHFLIEGDLNPDNSDVDKLFIQLVQTYNQLFEENPINASGVDAKAILSARLSKSRRLENLIAQLPGEKKNGLFGNLIALSLGLTPNFKSNFDLAEDAKLQLSKDTYDDDLDNLLAQIGDQYADLFLAAKNLSDAILLSDILRVNTEITKAPLSASMIKRYDEHHQDLTLLKALVRQQLPEKYKEIFFDQSKNGYAGYIDGGASQEEFYKFIKPILEKMDGTEELLVKLNREDLLRKQRTFDNGSIPHQIHLGELHAILRRQEDFYPFLKDNREKIEKILTFRIPYYVGPLARGNSRFAWMTRKSEETITPWNFEEVVDKGASAQSFIERMTNFDKNLPNEKVLPKHSLLYEYFTVYNELTKVKYVTEGMRKPAFLSGEQKKAIVDLLFKTNRKVTVKQLKEDYFKKIECFDSVEISGVEDRFNASLGTYHDLLKIIKDKDFLDNEENEDILEDIVLTLTLFEDREMIEERLKTYAHLFDDKVMKQLKRRRYTGWGRLSRKLINGIRDKQSGKTILDFLKSDGFANRNFMQLIHDDSLTFKEDIQKAQVSGQGDSLHEHIANLAGSPAIKKGILQTVKVVDELVKVMGRHKPENIVIEMARENQTTQKGQKNSRERMKRIEEGIKELGSQILKEHPVENTQLQNEKLYLYYLQNGRDMYVDQELDINRLSDYDVDHIVPQSFLKDDSIDNKVLTRSDKARGKSDNVPSEEVVKKMKNYWRQLLNAKLITQRKFDNLTKAERGGLSELDKAGFIKRQLVETRQITKHVAQILDSRMNTKYDENDKLIREVKVITLKSKLVSDFRKDFQFYKVREINNYHHAHDAYLNAVVGTALIKKYPKLESEFVYGDYKVYDVRKMIAKSEQEIGKATAKYFFYSNIMNFFKTEITLANGEIRKRPLIETNGETGEIVWDKGRDFATVRKVLSMPQVNIVKKTEVQTGGFSKESILPKRNSDKLIARKKDWDPKKYGGFDSPTVAYSVLVVAKVEKGKSKKLKSVKELLGITIMERSSFEKNPIDFLEAKGYKEVKKDLIIKLPKYSLFELENGRKRMLASAGELQKGNELALPSKYVNFLYLASHYEKLKGSPEDNEQKQLFVEQHKHYLDEIIEQISEFSKRVILADANLDKVLSAYNKHRDKPIREQAENIIHLFTLTNLGAPAAFKYFDTTIDRKRYTSTKEVLDATLIHQSITGLYETRIDLSQLGGDGGGSSGGSPAPGGMNPLQLLQPLPAEIKGTKLLAHWNSGATITCIPESFLEDEQPIKKTLIKTIHGEKQQNVYYVTFKVKGRKVEAEVIASPYEYILLSPTDVPWLTQQPLQLTILVPLQEYQEKILSKTALPEDQKQQLKTLFVKYDNLWQHWENQVGHRKIRPHNIATGDYPPRPQKQYPINPKAKPSIQIVIDDLLKQGVLTPQNSTMNTPVYPVPKPDGRWRMVLDYREVNKTIPLTAAQNQHSAGILATIVRQKYKTTLDLANGFWAHPITPESYWLTAFTWQGKQYCWTRLPQGFLNSPALFNADVVDLLKEIPNVQVYVDDIYLSHDDPKEHVQQLEKVFQILLQAGYVVSLKKSEIGQKTVEFLGFNITKEGRGLTDTFKTKLLNITPPKDLKQLQSILGKLNFARNFIPNFAELVQPLYNLIAPAKGKYIEWSEENTKQLNMVIEALNTASNLEERLPEQRLVIKVNTSPSAGYVRYYNETGKKPIMYLNYVFSKAELKFSMLEKLLTTMHKALIKAMDLAMGQEILVYSPIVSMTKIQKTPLPERKALPIRWITWMTYLEDPRIQFHYDKTLPELKHIPDVYTSSQSPVKHPSQYEGVFYTDGSAIKSPDPTKSNNAGMGIVHATYKPEYQVLNQWSIPLGNHTAQMAEIAAVEFACKKALKIPGPVLVITDSFYVAESANKELPYWKSNGFVNNKKKPLKHISKWKSIAECLSMKPDITIQHEKGISLQIPVFILKGNALADKLATQGSYVVNAGKRTADGSEFEKRTADGSEFESPKKKAKVE

SEQ ID NO: 7146 - protein, 2092 aa, synthetic construct
MPAAKRVKLDGGDKKYSIGLDIGTNSVGWAVITDEYKVPSKKFKVLGNTDRHSIKKNLIGALLFDSGETAEATRLKRTARRRYTRRKNRICYLQEIFSNEMAKVDDSFFHRLEESFLVEEDKKHERHPIFGNIVDEVAYHEKYPTIYHLRKKLVDSTDKADLRLIYLALAHMIKFRGHFLIEGDLNPDNSDVDKLFIQLVQTYNQLFEENPINASGVDAKAILSARLSKSRRLENLIAQLPGEKKNGLFGNLIALSLGLTPNFKSNFDLAEDAKLQLSKDTYDDDLDNLLAQIGDQYADLFLAAKNLSDAILLSDILRVNTEITKAPLSASMIKRYDEHHQDLTLLKALVRQQLPEKYKEIFFDQSKNGYAGYIDGGASQEEFYKFIKPILEKMDGTEELLVKLNREDLLRKQRTFDNGSIPHQIHLGELHAILRRQEDFYPFLKDNREKIEKILTFRIPYYVGPLARGNSRFAWMTRKSEETITPWNFEEVVDKGASAQSFIERMTNFDKNLPNEKVLPKHSLLYEYFTVYNELTKVKYVTEGMRKPAFLSGEQKKAIVDLLFKTNRKVTVKQLKEDYFKKIECFDSVEISGVEDRFNASLGTYHDLLKIIKDKDFLDNEENEDILEDIVLTLTLFEDREMIEERLKTYAHLFDDKVMKQLKRRRYTGWGRLSRKLINGIRDKQSGKTILDFLKSDGFANRNFMQLIHDDSLTFKEDIQKAQVSGQGDSLHEHIANLAGSPAIKKGILQTVKVVDELVKVMGRHKPENIVIEMARENQTTQKGQKNSRERMKRIEEGIKELGSQILKEHPVENTQLQNEKLYLYYLQNGRDMYVDQELDINRLSDYDVDHIVPQSFLKDDSIDNKVLTRSDKARGKSDNVPSEEVVKKMKNYWRQLLNAKLITQRKFDNLTKAERGGLSELDKAGFIKRQLVETRQITKHVAQILDSRMNTKYDENDKLIREVKVITLKSKLVSDFRKDFQFYKVREINNYHHAHDAYLNAVVGTALIKKYPKLESEFVYGDYKVYDVRKMIAKSEQEIGKATAKYFFYSNIMNFFKTEITLANGEIRKRPLIETNGETGEIVWDKGRDFATVRKVLSMPQVNIVKKTEVQTGGFSKESILPKRNSDKLIARKKDWDPKKYGGFDSPTVAYSVLVVAKVEKGKSKKLKSVKELLGITIMERSSFEKNPIDFLEAKGYKEVKKDLIIKLPKYSLFELENGRKRMLASAGELQKGNELALPSKYVNFLYLASHYEKLKGSPEDNEQKQLFVEQHKHYLDEIIEQISEFSKRVILADANLDKVLSAYNKHRDKPIREQAENIIHLFTLTNLGAPAAFKYFDTTIDRKRYTSTKEVLDATLIHQSITGLYETRIDLSQLGGDGGGSSGGSPAPGGVLNLEEEYRLHEKPVPSSIDPSWLQLFPTVWAERAGMGLANQVPPVVVELRSGASPVAVRQYPMSKEAREGIRPHIQKFLDLGVLVPCRSPWNTPLLPVKKPGTNDYRPVQDLREINKRVQDIHPTVPNPYNLLSSLPPSYTWYSVLDLKDAFFCLRLHPNSQPLFAFEWKDPEKGNTGQLTWTRLPQGFKNSPTLFNEALHRDLAPFRALNPQVVLLQYVDDLLVAAPTYEDCKKGTQKLLQELSKLGYRVSAKKAQLCQREVTYLGYLLKEGKRWLTPARKATVMKIPVPTTPRQVREFLGKAGFCRLFIPGFASLAAPLYPLTKPSIPFIWTEEHQQAFDHIKKALLSAPALALPDLTKPFTLYIDERAGVARGVLTQTLGPWRRPVAYLSKKLDPVASGWPTCLKAVAAVALLLKDADKLTLGQNVTVIASHSLESIVRQPPDRWMTNARMTHYQSLLLNERVSFAPPAVLNPATLLPVESEATPVHRCSEILAEETGTRRDLEDQPLPGVPTWYTDGSSFITEGKRRAGAPIVDGKRTVWASSLPEGTSAQKAELVALTQALRLAEGKNINIYTDSRYAFATAHIHGAIYKQRGWLTSAGKDIKNKEEILALLEAIHLPRRVAIIHCPGHQRGSNPVATGNRRADEAAKQAALSTRVLAGTTKPAGKRTADGSEFEKRTADGSEFESPKKKAKVE

SEQ ID NO: 7147 - protein, 2094 aa, synthetic construct
MPAAKRVKLDGGDKKYSIGLDIGTNSVGWAVITDEYKVPSKKFKVLGNTDRHSIKKNLIGALLFDSGETAEATRLKRTARRRYTRRKNRICYLQEIFSNEMAKVDDSFFHRLEESFLVEEDKKHERHPIFGNIVDEVAYHEKYPTIYHLRKKLVDSTDKADLRLIYLALAHMIKFRGHFLIEGDLNPDNSDVDKLFIQLVQTYNQLFEENPINASGVDAKAILSARLSKSRRLENLIAQLPGEKKNGLFGNLIALSLGLTPNFKSNFDLAEDAKLQLSKDTYDDDLDNLLAQIGDQYADLFLAAKNLSDAILLSDILRVNTEITKAPLSASMIKRYDEHHQDLTLLKALVRQQLPEKYKEIFFDQSKNGYAGYIDGGASQEEFYKFIKPILEKMDGTEELLVKLNREDLLRKQRTFDNGSIPHQIHLGELHAILRRQEDFYPFLKDNREKIEKILTFRIPYYVGPLARGNSRFAWMTRKSEETITPWNFEEVVDKGASAQSFIERMTNFDKNLPNEKVLPKHSLLYEYFTVYNELTKVKYVTEGMRKPAFLSGEQKKAIVDLLFKTNRKVTVKQLKEDYFKKIECFDSVEISGVEDRFNASLGTYHDLLKIIKDKDFLDNEENEDILEDIVLTLTLFEDREMIEERLKTYAHLFDDKVMKQLKRRRYTGWGRLSRKLINGIRDKQSGKTILDFLKSDGFANRNFMQLIHDDSLTFKEDIQKAQVSGQGDSLHEHIANLAGSPAIKKGILQTVKVVDELVKVMGRHKPENIVIEMARENQTTQKGQKNSRERMKRIEEGIKELGSQILKEHPVENTQLQNEKLYLYYLQNGRDMYVDQELDINRLSDYDVDHIVPQSFLKDDSIDNKVLTRSDKARGKSDNVPSEEVVKKMKNYWRQLLNAKLITQRKFDNLTKAERGGLSELDKAGFIKRQLVETRQITKHVAQILDSRMNTKYDENDKLIREVKVITLKSKLVSDFRKDFQFYKVREINNYHHAHDAYLNAVVGTALIKKYPKLESEFVYGDYKVYDVRKMIAKSEQEIGKATAKYFFYSNIMNFFKTEITLANGEIRKRPLIETNGETGEIVWDKGRDFATVRKVLSMPQVNIVKKTEVQTGGFSKESILPKRNSDKLIARKKDWDPKKYGGFDSPTVAYSVLVVAKVEKGKSKKLKSVKELLGITIMERSSFEKNPIDFLEAKGYKEVKKDLIIKLPKYSLFELENGRKRMLASAGELQKGNELALPSKYVNFLYLASHYEKLKGSPEDNEQKQLFVEQHKHYLDEIIEQISEFSKRVILADANLDKVLSAYNKHRDKPIREQAENIIHLFTLTNLGAPAAFKYFDTTIDRKRYTSTKEVLDATLIHQSITGLYETRIDLSQLGGDGGGSSGGSPAPGGTLNIEDEYRLHETSKEPDVSLGSTWLSDFPQAWAETGGMGLAVRQAPLIIPLKATSTPVSIKQYPMSQEARLGIKPHIQRLLDQGILVPCQSPWNTPLLPVKKPGTNDYRPVQDLREVNKRVEDIHPTVPNPYNLLSGLPPSHQWYTVLDLKDAFFCLRLHPTSQPLFAFEWRDPEMGISGQLTWTRLPQGFKNSPTLFNEALHRDLAGFRIQHPDLILLQYVDDLLLAATSELDCQQGTRALLQTLGDLGYRASAKKAQICQKQVKYLGYLLKEGQRWLTEARKETVMGQPIPKTPRQLREFLGTAGFCRLWIPGFAEMAAPLYPLTKPGTLFNWGPDQQKAFQEIKQALLTAPALGLPDLTKPFELFVDEKQGYAKGVLTQKLGPWRRPVAYLSKKLDPVAAGWPPCLRMVAAIAVLTKDAGKLTMGQPLVILAPHAVEALVKQPPDRWLSNARMTHYQALLLDTDRVQFGPVVALNPATLLPLPEEGLQHDCLDILAEAHGTRSDLMDQPLPDADHTWYTDGSSFLQEGQRKAGAAVTTETEVIWARALPAGTSAQRAELIALTQALKMAEGKKLNVYTDSRYAFATAHIHGEIYRRRGWLTSEGKEIKNKDEILALLKALFLPKRLSIIHCPGHQKGNSAEARGNRMADQAAREVATRETPETSTLLAGKRTADGSEFEKRTADGSEFESPKKKAKVE

SEQ ID NO: 7148 - protein, 2092 aa, synthetic construct
MPAAKRVKLDGGDKKYSIGLDIGTNSVGWAVITDEYKVPSKKFKVLGNTDRHSIKKNLIGALLFDSGETAEATRLKRTARRRYTRRKNRICYLQEIFSNEMAKVDDSFFHRLEESFLVEEDKKHERHPIFGNIVDEVAYHEKYPTIYHLRKKLVDSTDKADLRLIYLALAHMIKFRGHFLIEGDLNPDNSDVDKLFIQLVQTYNQLFEENPINASGVDAKAILSARLSKSRRLENLIAQLPGEKKNGLFGNLIALSLGLTPNFKSNFDLAEDAKLQLSKDTYDDDLDNLLAQIGDQYADLFLAAKNLSDAILLSDILRVNTEITKAPLSASMIKRYDEHHQDLTLLKALVRQQLPEKYKEIFFDQSKNGYAGYIDGGASQEEFYKFIKPILEKMDGTEELLVKLNREDLLRKQRTFDNGSIPHQIHLGELHAILRRQEDFYPFLKDNREKIEKILTFRIPYYVGPLARGNSRFAWMTRKSEETITPWNFEEVVDKGASAQSFIERMTNFDKNLPNEKVLPKHSLLYEYFTVYNELTKVKYVTEGMRKPAFLSGEQKKAIVDLLFKTNRKVTVKQLKEDYFKKIECFDSVEISGVEDRFNASLGTYHDLLKIIKDKDFLDNEENEDILEDIVLTLTLFEDREMIEERLKTYAHLFDDKVMKQLKRRRYTGWGRLSRKLINGIRDKQSGKTILDFLKSDGFANRNFMQLIHDDSLTFKEDIQKAQVSGQGDSLHEHIANLAGSPAIKKGILQTVKVVDELVKVMGRHKPENIVIEMARENQTTQKGQKNSRERMKRIEEGIKELGSQILKEHPVENTQLQNEKLYLYYLQNGRDMYVDQELDINRLSDYDVDHIVPQSFLKDDSIDNKVLTRSDKARGKSDNVPSEEVVKKMKNYWRQLLNAKLITQRKFDNLTKAERGGLSELDKAGFIKRQLVETRQITKHVAQILDSRMNTKYDENDKLIREVKVITLKSKLVSDFRKDFQFYKVREINNYHHAHDAYLNAVVGTALIKKYPKLESEFVYGDYKVYDVRKMIAKSEQEIGKATAKYFFYSNIMNFFKTEITLANGEIRKRPLIETNGETGEIVWDKGRDFATVRKVLSMPQVNIVKKTEVQTGGFSKESILPKRNSDKLIARKKDWDPKKYGGFDSPTVAYSVLVVAKVEKGKSKKLKSVKELLGITIMERSSFEKNPIDFLEAKGYKEVKKDLIIKLPKYSLFELENGRKRMLASAGELQKGNELALPSKYVNFLYLASHYEKLKGSPEDNEQKQLFVEQHKHYLDEIIEQISEFSKRVILADANLDKVLSAYNKHRDKPIREQAENIIHLFTLTNLGAPAAFKYFDTTIDRKRYTSTKEVLDATLIHQSITGLYETRIDLSQLGGDGGGSSGGSPAPGGVLNLEEEYRLHEKPVPSSIDPSWLQLFPTVWAERAGMGLANQVPPVVVELRSGASPVAVRQYPMSKEAREGIRPHIQRFLDLGVLVPCQSPWNTPLLPVKKPGTNDYRPVQDLREINKRVQDIHPTVPNPYNLLSSLPPSHTWYSVLDLKDAFFCLKLHPNSQPLFAFEWRDPEKGNTGQLTWTRLPQGFKNSPTLFNEALHRDLAPFRALNPQVVLLQYVDDLLVAAPTYRDCKEGTQKLLQELSKLGYRVSAKKAQLCQKEVTYLGYLLKEGKRWLTPARKATVMKIPPPTTPRQVREFLGTAGFCRLWIPGFASLAAPLYPLTKPSIPFIWTEEHQKAFDRIKEALLSAPALALPDLTKPFTLYVDERAGVARGVLTQTLGPWRRPVAYLSKKLDPVASGWPTCLKAVAAVALLLKDADKLTLGQNVTVIASHSLESIVRQPPDRWMTNARMTHYQSLLLNERVSFAPPAVLNPATLLPVESEATPVHRCSEILAEETGTRRDLKDQPLPGVPAWYTDGSSFIAEGKRRAGAAIVDGKRTVWASSLPEGTSAQKAELVALTQALRLAEGKDINIYTDSRYAFATAHIHGAIYKQRGWLTSAGKDIKNKEEILALLEAIHLPKRVAIIHCPGHQKGNDPVATGNRRADEAAKQAALSTRVLAETTKPAGKRTADGSEFEKRTADGSEFESPKKKAKVE

SEQ ID NO: 7149 - protein, 2092 aa, synthetic construct
MPAAKRVKLDGGDKKYSIGLDIGTNSVGWAVITDEYKVPSKKFKVLGNTDRHSIKKNLIGALLFDSGETAEATRLKRTARRRYTRRKNRICYLQEIFSNEMAKVDDSFFHRLEESFLVEEDKKHERHPIFGNIVDEVAYHEKYPTIYHLRKKLVDSTDKADLRLIYLALAHMIKFRGHFLIEGDLNPDNSDVDKLFIQLVQTYNQLFEENPINASGVDAKAILSARLSKSRRLENLIAQLPGEKKNGLFGNLIALSLGLTPNFKSNFDLAEDAKLQLSKDTYDDDLDNLLAQIGDQYADLFLAAKNLSDAILLSDILRVNTEITKAPLSASMIKRYDEHHQDLTLLKALVRQQLPEKYKEIFFDQSKNGYAGYIDGGASQEEFYKFIKPILEKMDGTEELLVKLNREDLLRKQRTFDNGSIPHQIHLGELHAILRRQEDFYPFLKDNREKIEKILTFRIPYYVGPLARGNSRFAWMTRKSEETITPWNFEEVVDKGASAQSFIERMTNFDKNLPNEKVLPKHSLLYEYFTVYNELTKVKYVTEGMRKPAFLSGEQKKAIVDLLFKTNRKVTVKQLKEDYFKKIECFDSVEISGVEDRFNASLGTYHDLLKIIKDKDFLDNEENEDILEDIVLTLTLFEDREMIEERLKTYAHLFDDKVMKQLKRRRYTGWGRLSRKLINGIRDKQSGKTILDFLKSDGFANRNFMQLIHDDSLTFKEDIQKAQVSGQGDSLHEHIANLAGSPAIKKGILQTVKVVDELVKVMGRHKPENIVIEMARENQTTQKGQKNSRERMKRIEEGIKELGSQILKEHPVENTQLQNEKLYLYYLQNGRDMYVDQELDINRLSDYDVDHIVPQSFLKDDSIDNKVLTRSDKARGKSDNVPSEEVVKKMKNYWRQLLNAKLITQRKFDNLTKAERGGLSELDKAGFIKRQLVETRQITKHVAQILDSRMNTKYDENDKLIREVKVITLKSKLVSDFRKDFQFYKVREINNYHHAHDAYLNAVVGTALIKKYPKLESEFVYGDYKVYDVRKMIAKSEQEIGKATAKYFFYSNIMNFFKTEITLANGEIRKRPLIETNGETGEIVWDKGRDFATVRKVLSMPQVNIVKKTEVQTGGFSKESILPKRNSDKLIARKKDWDPKKYGGFDSPTVAYSVLVVAKVEKGKSKKLKSVKELLGITIMERSSFEKNPIDFLEAKGYKEVKKDLIIKLPKYSLFELENGRKRMLASAGELQKGNELALPSKYVNFLYLASHYEKLKGSPEDNEQKQLFVEQHKHYLDEIIEQISEFSKRVILADANLDKVLSAYNKHRDKPIREQAENIIHLFTLTNLGAPAAFKYFDTTIDRKRYTSTKEVLDATLIHQSITGLYETRIDLSQLGGDGGGSSGGSPAPGGVLNLEEEYRLHEKPVPSSIDPSWLQLFPTVWAERAGMGLANQVPPVVVELRSGASPVAVRQYPMSKEAREGIRPHIQRFLDLGVLVPCQSPWNTPLLPVKKPGTNDYRPVQDLREINKRVQDIHPTVPNPYNLLSSLPPSHTWYSVLDLKDAFFCLKLHPNSQPLFAFEWRDPEKGNTGQLTWTRLPQGFKNSPTLFNEALHRDLAPFRALNPQVVLLQYVDDLLVAAPTYRDCKEGTQKLLQELSKLGYRVSAKKAQLCQKEVTYLGYLLKEGKRWLTPARKATVMKIPPPTTPRQVREFLGKAGFCRLFIPGFASLAAPLYPLTKPSIPFIWTEEHQKAFDRIKEALLSAPALALPDLTKPFTLYVDERAGVARGVLTQTLGPWRRPVAYLSKKLDPVASGWPTCLKAVAAVALLLKDADKLTLGQNVTVIASHSLESIVRQPPDRWMTNARMTHYQSLLLNERVSFAPPAVLNPATLLPVESEATPVHRCSEILAEETGTRRDLKDQPLPGVPAWYTDGSSFIAEGKRRAGAAIVDGKRTVWASSLPEGTSAQKAELVALTQALRLAEGKDINIYTDSRYAFATAHIHGAIYKQRGWLTSAGKDIKNKEEILALLEAIHLPKRVAIIHCPGHQKGNDPVATGNRRADEAAKQAALSTRVLAETTKPAGKRTADGSEFEKRTADGSEFESPKKKAKVE

SEQ ID NO: 7150 - protein, 2094 aa, synthetic construct
MPAAKRVKLDGGDKKYSIGLDIGTNSVGWAVITDEYKVPSKKFKVLGNTDRHSIKKNLIGALLFDSGETAEATRLKRTARRRYTRRKNRICYLQEIFSNEMAKVDDSFFHRLEESFLVEEDKKHERHPIFGNIVDEVAYHEKYPTIYHLRKKLVDSTDKADLRLIYLALAHMIKFRGHFLIEGDLNPDNSDVDKLFIQLVQTYNQLFEENPINASGVDAKAILSARLSKSRRLENLIAQLPGEKKNGLFGNLIALSLGLTPNFKSNFDLAEDAKLQLSKDTYDDDLDNLLAQIGDQYADLFLAAKNLSDAILLSDILRVNTEITKAPLSASMIKRYDEHHQDLTLLKALVRQQLPEKYKEIFFDQSKNGYAGYIDGGASQEEFYKFIKPILEKMDGTEELLVKLNREDLLRKQRTFDNGSIPHQIHLGELHAILRRQEDFYPFLKDNREKIEKILTFRIPYYVGPLARGNSRFAWMTRKSEETITPWNFEEVVDKGASAQSFIERMTNFDKNLPNEKVLPKHSLLYEYFTVYNELTKVKYVTEGMRKPAFLSGEQKKAIVDLLFKTNRKVTVKQLKEDYFKKIECFDSVEISGVEDRFNASLGTYHDLLKIIKDKDFLDNEENEDILEDIVLTLTLFEDREMIEERLKTYAHLFDDKVMKQLKRRRYTGWGRLSRKLINGIRDKQSGKTILDFLKSDGFANRNFMQLIHDDSLTFKEDIQKAQVSGQGDSLHEHIANLAGSPAIKKGILQTVKVVDELVKVMGRHKPENIVIEMARENQTTQKGQKNSRERMKRIEEGIKELGSQILKEHPVENTQLQNEKLYLYYLQNGRDMYVDQELDINRLSDYDVDHIVPQSFLKDDSIDNKVLTRSDKARGKSDNVPSEEVVKKMKNYWRQLLNAKLITQRKFDNLTKAERGGLSELDKAGFIKRQLVETRQITKHVAQILDSRMNTKYDENDKLIREVKVITLKSKLVSDFRKDFQFYKVREINNYHHAHDAYLNAVVGTALIKKYPKLESEFVYGDYKVYDVRKMIAKSEQEIGKATAKYFFYSNIMNFFKTEITLANGEIRKRPLIETNGETGEIVWDKGRDFATVRKVLSMPQVNIVKKTEVQTGGFSKESILPKRNSDKLIARKKDWDPKKYGGFDSPTVAYSVLVVAKVEKGKSKKLKSVKELLGITIMERSSFEKNPIDFLEAKGYKEVKKDLIIKLPKYSLFELENGRKRMLASAGELQKGNELALPSKYVNFLYLASHYEKLKGSPEDNEQKQLFVEQHKHYLDEIIEQISEFSKRVILADANLDKVLSAYNKHRDKPIREQAENIIHLFTLTNLGAPAAFKYFDTTIDRKRYTSTKEVLDATLIHQSITGLYETRIDLSQLGGDGGGSSGGSPAPGGTLNIEDEYRLHETSKEPDVPLGSTWLSDFPQAWAETGGMGLAVRQAPLIIPLKATSTPVSIKQYPMSQEARLGIKPHIQRLLDQGILVPCQSPWNTPLLPVKKPGTNDYRPVQDLREVNKRVEDIHPTVPNPYNLLSGLPPSHQWYTVLDLKDAFFCLRLHPTSQPLFAFEWRDPEMGISGQLTWTRLPQGFKNSPTLFNEALHRDLADFRIQHPDLILLQYVDDLLLAATSEQDCQRGTRALLQTLGNLGYRASAKKAQICQKQVKYLGYLLKEGQRWLTEARKETVMGQPTPKTPRQLREFLGTAGFCRLWIPGFAEMAAPLYPLTKPGTLFNWGPDQQKAYQEIKQALLTAPALGLPDLTKPFELFVDEKQGYAKGVLTQKLGPWRRPVAYLSKKLDPVAAGWPPCLRMVAAIAVLTKDAGKLTMGQPLVILAPHAVEALVKQPPDRWLSNARMTHYQAMLLDTDRVQFGPVVALNPATLLPLPEKEAPHDCLEILAETHGTRPDLTDQPIPDADYTWYTDGSSFLQEGQRRAGAAVTTETEVIWARALPAGTSAQRAELIALTQALKMAEGKKLNVYTDSRYAFATAHVHGEIYRRRGWLTSEGREIKNKNEILALLKALFLPKRLSIIHCPGHQKGNSAEARGNRMADQAAREAAMKAVLETSTLLAGKRTADGSEFEKRTADGSEFESPKKKAKVE

SEQ ID NO: 7151 - protein, 2096 aa, synthetic construct
MPAAKRVKLDGGDKKYSIGLDIGTNSVGWAVITDEYKVPSKKFKVLGNTDRHSIKKNLIGALLFDSGETAEATRLKRTARRRYTRRKNRICYLQEIFSNEMAKVDDSFFHRLEESFLVEEDKKHERHPIFGNIVDEVAYHEKYPTIYHLRKKLVDSTDKADLRLIYLALAHMIKFRGHFLIEGDLNPDNSDVDKLFIQLVQTYNQLFEENPINASGVDAKAILSARLSKSRRLENLIAQLPGEKKNGLFGNLIALSLGLTPNFKSNFDLAEDAKLQLSKDTYDDDLDNLLAQIGDQYADLFLAAKNLSDAILLSDILRVNTEITKAPLSASMIKRYDEHHQDLTLLKALVRQQLPEKYKEIFFDQSKNGYAGYIDGGASQEEFYKFIKPILEKMDGTEELLVKLNREDLLRKQRTFDNGSIPHQIHLGELHAILRRQEDFYPFLKDNREKIEKILTFRIPYYVGPLARGNSRFAWMTRKSEETITPWNFEEVVDKGASAQSFIERMTNFDKNLPNEKVLPKHSLLYEYFTVYNELTKVKYVTEGMRKPAFLSGEQKKAIVDLLFKTNRKVTVKQLKEDYFKKIECFDSVEISGVEDRFNASLGTYHDLLKIIKDKDFLDNEENEDILEDIVLTLTLFEDREMIEERLKTYAHLFDDKVMKQLKRRRYTGWGRLSRKLINGIRDKQSGKTILDFLKSDGFANRNFMQLIHDDSLTFKEDIQKAQVSGQGDSLHEHIANLAGSPAIKKGILQTVKVVDELVKVMGRHKPENIVIEMARENQTTQKGQKNSRERMKRIEEGIKELGSQILKEHPVENTQLQNEKLYLYYLQNGRDMYVDQELDINRLSDYDVDHIVPQSFLKDDSIDNKVLTRSDKARGKSDNVPSEEVVKKMKNYWRQLLNAKLITQRKFDNLTKAERGGLSELDKAGFIKRQLVETRQITKHVAQILDSRMNTKYDENDKLIREVKVITLKSKLVSDFRKDFQFYKVREINNYHHAHDAYLNAVVGTALIKKYPKLESEFVYGDYKVYDVRKMIAKSEQEIGKATAKYFFYSNIMNFFKTEITLANGEIRKRPLIETNGETGEIVWDKGRDFATVRKVLSMPQVNIVKKTEVQTGGFSKESILPKRNSDKLIARKKDWDPKKYGGFDSPTVAYSVLVVAKVEKGKSKKLKSVKELLGITIMERSSFEKNPIDFLEAKGYKEVKKDLIIKLPKYSLFELENGRKRMLASAGELQKGNELALPSKYVNFLYLASHYEKLKGSPEDNEQKQLFVEQHKHYLDEIIEQISEFSKRVILADANLDKVLSAYNKHRDKPIREQAENIIHLFTLTNLGAPAAFKYFDTTIDRKRYTSTKEVLDATLIHQSITGLYETRIDLSQLGGDGGGSSPAPGGSGGTAPLEEEYRLFLEAPIQNVTLLEQWKREIPKVWAEINPPGLASTQAPIHVQLLSTALPVRVRQYPITLEAKRSLRETIRKFRAAGILRPVHSPWNTPLLPVRKSGTSEYRMVQDLREVNKRVETIHPTVPNPYTLLSLLPPDRIWYSVLDLKDAFFCIPLAPESQLIFAFEWADAEEGESGQLTWTRLPQGFKNSPTLFNEALNRDLQGFRLDHPSVSLLQYVDDLLIAADTQAACLSATRDLLMTLAELGYRVSGKKAQLCQEEVTYLGFKIHKGSRSLSNSRTQAILQIPVPKTKRQVREFLGTIGYCRLWIPGFAELAQPLYAATRPGNDPLVWGEKEEEAFQSLKLALTQPPALALPSLDKPFQLFVEETSGAAKGVLTQALGPWKRPVAYLSKRLDPVAAGWPRCLRAIAAAALLTREASKLTFGQDIEITSSHNLESLLRSPPDKWLTNARITQYQVLLLDPPRVRFKQTAALNPATLLPETDDTLPIHHCLDTLDSLTSTRPDLTDQPLAQAEATLFTDGSSYIRDGKRYAGAAVVTLDSVIWAEPLPIGTSAQKAELIALTKALEWSKDKSVNIYTDSRYAFATLHVHGMIYRERGWLTAGGKAIKNAPEILALLTAVWLPKRVAVMHCKGHQKDDAPTSTGNRRADEVAREVAIRPLSTQATISAGKRTADGSEFEKRTADGSEFESPKKKAKVE

SEQ ID NO: 7152 - protein, 2096 aa, synthetic construct
MPAAKRVKLDGGDKKYSIGLDIGTNSVGWAVITDEYKVPSKKFKVLGNTDRHSIKKNLIGALLFDSGETAEATRLKRTARRRYTRRKNRICYLQEIFSNEMAKVDDSFFHRLEESFLVEEDKKHERHPIFGNIVDEVAYHEKYPTIYHLRKKLVDSTDKADLRLIYLALAHMIKFRGHFLIEGDLNPDNSDVDKLFIQLVQTYNQLFEENPINASGVDAKAILSARLSKSRRLENLIAQLPGEKKNGLFGNLIALSLGLTPNFKSNFDLAEDAKLQLSKDTYDDDLDNLLAQIGDQYADLFLAAKNLSDAILLSDILRVNTEITKAPLSASMIKRYDEHHQDLTLLKALVRQQLPEKYKEIFFDQSKNGYAGYIDGGASQEEFYKFIKPILEKMDGTEELLVKLNREDLLRKQRTFDNGSIPHQIHLGELHAILRRQEDFYPFLKDNREKIEKILTFRIPYYVGPLARGNSRFAWMTRKSEETITPWNFEEVVDKGASAQSFIERMTNFDKNLPNEKVLPKHSLLYEYFTVYNELTKVKYVTEGMRKPAFLSGEQKKAIVDLLFKTNRKVTVKQLKEDYFKKIECFDSVEISGVEDRFNASLGTYHDLLKIIKDKDFLDNEENEDILEDIVLTLTLFEDREMIEERLKTYAHLFDDKVMKQLKRRRYTGWGRLSRKLINGIRDKQSGKTILDFLKSDGFANRNFMQLIHDDSLTFKEDIQKAQVSGQGDSLHEHIANLAGSPAIKKGILQTVKVVDELVKVMGRHKPENIVIEMARENQTTQKGQKNSRERMKRIEEGIKELGSQILKEHPVENTQLQNEKLYLYYLQNGRDMYVDQELDINRLSDYDVDHIVPQSFLKDDSIDNKVLTRSDKARGKSDNVPSEEVVKKMKNYWRQLLNAKLITQRKFDNLTKAERGGLSELDKAGFIKRQLVETRQITKHVAQILDSRMNTKYDENDKLIREVKVITLKSKLVSDFRKDFQFYKVREINNYHHAHDAYLNAVVGTALIKKYPKLESEFVYGDYKVYDVRKMIAKSEQEIGKATAKYFFYSNIMNFFKTEITLANGEIRKRPLIETNGETGEIVWDKGRDFATVRKVLSMPQVNIVKKTEVQTGGFSKESILPKRNSDKLIARKKDWDPKKYGGFDSPTVAYSVLVVAKVEKGKSKKLKSVKELLGITIMERSSFEKNPIDFLEAKGYKEVKKDLIIKLPKYSLFELENGRKRMLASAGELQKGNELALPSKYVNFLYLASHYEKLKGSPEDNEQKQLFVEQHKHYLDEIIEQISEFSKRVILADANLDKVLSAYNKHRDKPIREQAENIIHLFTLTNLGAPAAFKYFDTTIDRKRYTSTKEVLDATLIHQSITGLYETRIDLSQLGGDGGGSSPAPGGSGGTAPLEEEYRLFLEAPIQNVTLLEQWKREIPKVWAEINPPGLASTQAPIHVQLLSTALPVRVRQYPITLEAKRSLRETIRKFRAAGILRPVHSPWNTPLLPVRKSGTSEYRMVQDLREVNKRVETIHPTVPNPYTLLSLLPPDRIWYSVLDLKDAFFCIPLAPESQLIFAFEWADAEEGESGQLTWTRLPQGFKNSPTLFNEALNRDLQGFRLDHPSVSLLQYVDDLLIAADTQAACLSATRDLLMTLAELGYRVSGKKAQLCQEEVTYLGFKIHKGSRSLSNSRTQAILQIPVPKTKRQVREFLGKIGYCRLFIPGFAELAQPLYAATRPGNDPLVWGEKEEEAFQSLKLALTQPPALALPSLDKPFQLFVEETSGAAKGVLTQALGPWKRPVAYLSKRLDPVAAGWPRCLRAIAAAALLTREASKLTFGQDIEITSSHNLESLLRSPPDKWLTNARITQYQVLLLDPPRVRFKQTAALNPATLLPETDDTLPIHHCLDTLDSLTSTRPDLTDQPLAQAEATLFTDGSSYIRDGKRYAGAAVVTLDSVIWAEPLPIGTSAQKAELIALTKALEWSKDKSVNIYTDSRYAFATLHVHGMIYRERGWLTAGGKAIKNAPEILALLTAVWLPKRVAVMHCKGHQKDDAPTSTGNRRADEVAREVAIRPLSTQATISAGKRTADGSEFEKRTADGSEFESPKKKAKVE

SEQ ID NO: 7153 - protein, 2093 aa, synthetic construct
MPAAKRVKLDGGDKKYSIGLDIGTNSVGWAVITDEYKVPSKKFKVLGNTDRHSIKKNLIGALLFDSGETAEATRLKRTARRRYTRRKNRICYLQEIFSNEMAKVDDSFFHRLEESFLVEEDKKHERHPIFGNIVDEVAYHEKYPTIYHLRKKLVDSTDKADLRLIYLALAHMIKFRGHFLIEGDLNPDNSDVDKLFIQLVQTYNQLFEENPINASGVDAKAILSARLSKSRRLENLIAQLPGEKKNGLFGNLIALSLGLTPNFKSNFDLAEDAKLQLSKDTYDDDLDNLLAQIGDQYADLFLAAKNLSDAILLSDILRVNTEITKAPLSASMIKRYDEHHQDLTLLKALVRQQLPEKYKEIFFDQSKNGYAGYIDGGASQEEFYKFIKPILEKMDGTEELLVKLNREDLLRKQRTFDNGSIPHQIHLGELHAILRRQEDFYPFLKDNREKIEKILTFRIPYYVGPLARGNSRFAWMTRKSEETITPWNFEEVVDKGASAQSFIERMTNFDKNLPNEKVLPKHSLLYEYFTVYNELTKVKYVTEGMRKPAFLSGEQKKAIVDLLFKTNRKVTVKQLKEDYFKKIECFDSVEISGVEDRFNASLGTYHDLLKIIKDKDFLDNEENEDILEDIVLTLTLFEDREMIEERLKTYAHLFDDKVMKQLKRRRYTGWGRLSRKLINGIRDKQSGKTILDFLKSDGFANRNFMQLIHDDSLTFKEDIQKAQVSGQGDSLHEHIANLAGSPAIKKGILQTVKVVDELVKVMGRHKPENIVIEMARENQTTQKGQKNSRERMKRIEEGIKELGSQILKEHPVENTQLQNEKLYLYYLQNGRDMYVDQELDINRLSDYDVDHIVPQSFLKDDSIDNKVLTRSDKARGKSDNVPSEEVVKKMKNYWRQLLNAKLITQRKFDNLTKAERGGLSELDKAGFIKRQLVETRQITKHVAQILDSRMNTKYDENDKLIREVKVITLKSKLVSDFRKDFQFYKVREINNYHHAHDAYLNAVVGTALIKKYPKLESEFVYGDYKVYDVRKMIAKSEQEIGKATAKYFFYSNIMNFFKTEITLANGEIRKRPLIETNGETGEIVWDKGRDFATVRKVLSMPQVNIVKKTEVQTGGFSKESILPKRNSDKLIARKKDWDPKKYGGFDSPTVAYSVLVVAKVEKGKSKKLKSVKELLGITIMERSSFEKNPIDFLEAKGYKEVKKDLIIKLPKYSLFELENGRKRMLASAGELQKGNELALPSKYVNFLYLASHYEKLKGSPEDNEQKQLFVEQHKHYLDEIIEQISEFSKRVILADANLDKVLSAYNKHRDKPIREQAENIIHLFTLTNLGAPAAFKYFDTTIDRKRYTSTKEVLDATLIHQSITGLYETRIDLSQLGGDGGGSSPAPGGSGGTLQLEEEYRLFEPESTQKQEMDIWLKNFPQAWAETGGMGTAHCQAPVLIQLKATATPISIRQYPMPHEAYQGIKPHIRRMLDQGILKPCQSPWNTPLLPVKKPGTEDYRPVQDLREVNKRVEDIHPTVPNPYNLLSTLPPSHPWYTVLDLKDAFFCLRLHSESQLLFAFEWRDPEIGLSGQLTWTRLPQGFKNSPTLFNEALHSDLADFRVRYPALVLLQYVDDLLLAAATRTECLEGTKALLETLGNKGYRASAKKAQICLQEVTYLGYSLKDGQRWLTKARKEAILSIPVPKNSRQVREFLGKAGYCRLFIPGFAELAAPLYPLTRPGTLFQWGTEQQLAFEDIKKALLSSPALGLPDITKPFELFIDENSGFAKGVLVQKLGPWKRPVAYLSKKLDTVASGWPPCLRMVAAIAILVKDAGKLTLGQPLTILTSHPVEALVRQPPNKWLSNARMTHYQAMLLDAERVHFGPTVSLNPATLLPLPSGGNHHDCLQILAETHGTRPDLTDQPLPDADLTWYTDGSSFIRNGEREAGAAVTTESEVIWAAPLPPGTSAQRAELIALTQALKMAEGKKLTVYTDSRYAFATTHVHGEIYRRRGWLTSEGKEIKNKNEILALLEALFLPKRLSIIHCPGHQKGDSPQAKGNRLADDTAKKAATETHSSLTVLPAGKRTADGSEFEKRTADGSEFESPKKKAKVE

SEQ ID NO: 7154 - protein, 2125 aa, synthetic construct; identical to SEQ ID NO: 4526

SEQ ID NO: 7155 - protein, 2216 aa, synthetic construct
MPAAKRVKLDGGDKKYSIGLDIGTNSVGWAVITDEYKVPSKKFKVLGNTDRHSIKKNLIGALLFDSGETAEATRLKRTARRRYTRRKNRICYLQEIFSNEMAKVDDSFFHRLEESFLVEEDKKHERHPIFGNIVDEVAYHEKYPTIYHLRKKLVDSTDKADLRLIYLALAHMIKFRGHFLIEGDLNPDNSDVDKLFIQLVQTYNQLFEENPINASGVDAKAILSARLSKSRRLENLIAQLPGEKKNGLFGNLIALSLGLTPNFKSNFDLAEDAKLQLSKDTYDDDLDNLLAQIGDQYADLFLAAKNLSDAILLSDILRVNTEITKAPLSASMIKRYDEHHQDLTLLKALVRQQLPEKYKEIFFDQSKNGYAGYIDGGASQEEFYKFIKPILEKMDGTEELLVKLNREDLLRKQRTFDNGSIPHQIHLGELHAILRRQEDFYPFLKDNREKIEKILTFRIPYYVGPLARGNSRFAWMTRKSEETITPWNFEEVVDKGASAQSFIERMTNFDKNLPNEKVLPKHSLLYEYFTVYNELTKVKYVTEGMRKPAFLSGEQKKAIVDLLFKTNRKVTVKQLKEDYFKKIECFDSVEISGVEDRFNASLGTYHDLLKIIKDKDFLDNEENEDILEDIVLTLTLFEDREMIEERLKTYAHLFDDKVMKQLKRRRYTGWGRLSRKLINGIRDKQSGKTILDFLKSDGFANRNFMQLIHDDSLTFKEDIQKAQVSGQGDSLHEHIANLAGSPAIKKGILQTVKVVDELVKVMGRHKPENIVIEMARENQTTQKGQKNSRERMKRIEEGIKELGSQILKEHPVENTQLQNEKLYLYYLQNGRDMYVDQELDINRLSDYDVDHIVPQSFLKDDSIDNKVLTRSDKARGKSDNVPSEEVVKKMKNYWRQLLNAKLITQRKFDNLTKAERGGLSELDKAGFIKRQLVETRQITKHVAQILDSRMNTKYDENDKLIREVKVITLKSKLVSDFRKDFQFYKVREINNYHHAHDAYLNAVVGTALIKKYPKLESEFVYGDYKVYDVRKMIAKSEQEIGKATAKYFFYSNIMNFFKTEITLANGEIRKRPLIETNGETGEIVWDKGRDFATVRKVLSMPQVNIVKKTEVQTGGFSKESILPKRNSDKLIARKKDWDPKKYGGFDSPTVAYSVLVVAKVEKGKSKKLKSVKELLGITIMERSSFEKNPIDFLEAKGYKEVKKDLIIKLPKYSLFELENGRKRMLASAGELQKGNELALPSKYVNFLYLASHYEKLKGSPEDNEQKQLFVEQHKHYLDEIIEQISEFSKRVILADANLDKVLSAYNKHRDKPIREQAENIIHLFTLTNLGAPAAFKYFDTTIDRKRYTSTKEVLDATLIHQSITGLYETRIDLSQLGGDGGGSSPAPGGSGGTLGDQGSRGSDPLPEPRVTLTVEGIPTEFLVNTGAEHSVLTKPMGKMGSKRTVVAGATGSKVYPWTTKRLLKIGQKQVTHSFLVIPECPAPLLGRDLLTKLKAQIQFSTEGPQVTWEDRPAMCLVLNLEEEYRLHEKPVPPSIDPSWLQLFPMVWAEKAGMGLANQVPPVVVELKSDASPVAVRQYPMSKEAREGIRPHIQRFLDLGILVPCQSPWNTPLLPVKKPGTNDYRPVQDLREVNKRVQDIHPTVPNPYNLLSSLPPSHTWYSVLDLKDAFFCLKLHPNSQPLFAFEWRDPEKGNTGQLTWTRLPQGFKNSPTLFNEALHRDLASFRALNPQVVMLQYVDDLLVAAPTYRDCKEGTRRLLQELSKLGYRVSAKKAQLCREEVTYLGYLLKGGKRWLTPARKATVMKIPTPTTPRQVREFLGTAGFCRLWIPGFASLAAPLYPLTRPKVPFTWTEAHQEAFGRIKEALLSAPALALPDLTKPFALYVDEKEGVARGVLTQTLGPWRRPVAYLSKKLDPVASGWPTCLKAIAAVALLLKDADKLTLGQNVLVIAPHNLESIVRQPPDRWMTNARMTHYQSLLLNERVSFAPPAILNPATLLPVESDDTPIHICSEILAEETGTRPDLRDQPLPGVPAWYTDGSSFIMDGRRQAGAAIVDNKRTVWASNLPEGTSAQKAELIALTQALRLAEGKSINIYTDSRYAFATAHVHGAIYKQRGWLTSAGKDIKNKEEILALLEAIHLPKRVAIIHCPGHQRGTDPVATGNRKADEAAKQAAQSTRILTETTKNAGKRTADGSEFEKRTADGSEFESPKKKAKVE

SEQ ID NO: 7156 - protein, 2094 aa, synthetic construct
MPAAKRVKLDGGDKKYSIGLDIGTNSVGWAVITDEYKVPSKKFKVLGNTDRHSIKKNLIGALLFDSGETAEATRLKRTARRRYTRRKNRICYLQEIFSNEMAKVDDSFFHRLEESFLVEEDKKHERHPIFGNIVDEVAYHEKYPTIYHLRKKLVDSTDKADLRLIYLALAHMIKFRGHFLIEGDLNPDNSDVDKLFIQLVQTYNQLFEENPINASGVDAKAILSARLSKSRRLENLIAQLPGEKKNGLFGNLIALSLGLTPNFKSNFDLAEDAKLQLSKDTYDDDLDNLLAQIGDQYADLFLAAKNLSDAILLSDILRVNTEITKAPLSASMIKRYDEHHQDLTLLKALVRQQLPEKYKEIFFDQSKNGYAGYIDGGASQEEFYKFIKPILEKMDGTEELLVKLNREDLLRKQRTFDNGSIPHQIHLGELHAILRRQEDFYPFLKDNREKIEKILTFRIPYYVGPLARGNSRFAWMTRKSEETITPWNFEEVVDKGASAQSFIERMTNFDKNLPNEKVLPKHSLLYEYFTVYNELTKVKYVTEGMRKPAFLSGEQKKAIVDLLFKTNRKVTVKQLKEDYFKKIECFDSVEISGVEDRFNASLGTYHDLLKIIKDKDFLDNEENEDILEDIVLTLTLFEDREMIEERLKTYAHLFDDKVMKQLKRRRYTGWGRLSRKLINGIRDKQSGKTILDFLKSDGFANRNFMQLIHDDSLTFKEDIQKAQVSGQGDSLHEHIANLAGSPAIKKGILQTVKVVDELVKVMGRHKPENIVIEMARENQTTQKGQKNSRERMKRIEEGIKELGSQILKEHPVENTQLQNEKLYLYYLQNGRDMYVDQELDINRLSDYDVDHIVPQSFLKDDSIDNKVLTRSDKARGKSDNVPSEEVVKKMKNYWRQLLNAKLITQRKFDNLTKAERGGLSELDKAGFIKRQLVETRQITKHVAQILDSRMNTKYDENDKLIREVKVITLKSKLVSDFRKDFQFYKVREINNYHHAHDAYLNAVVGTALIKKYPKLESEFVYGDYKVYDVRKMIAKSEQEIGKATAKYFFYSNIMNFFKTEITLANGEIRKRPLIETNGETGEIVWDKGRDFATVRKVLSMPQVNIVKKTEVQTGGFSKESILPKRNSDKLIARKKDWDPKKYGGFDSPTVAYSVLVVAKVEKGKSKKLKSVKELLGITIMERSSFEKNPIDFLEAKGYKEVKKDLIIKLPKYSLFELENGRKRMLASAGELQKGNELALPSKYVNFLYLASHYEKLKGSPEDNEQKQLFVEQHKHYLDEIIEQISEFSKRVILADANLDKVLSAYNKHRDKPIREQAENIIHLFTLTNLGAPAAFKYFDTTIDRKRYTSTKEVLDATLIHQSITGLYETRIDLSQLGGDGGGSSPAPGGSGGTLNLEDEYRLYETSAEPEVSPGSTWLSDFPQAWAETGGMGLAVRQAPLIIPLKATSTPVSIKQYPMSQEAKLGIKPHIQRLLDQGILVPCQSPWNTPLLPVKKPGTNDYRPVQDLREVNKRVEDIHPTVPNPYNLLSGLPPSHRWYTVLDLKDAFFCLRLHPTSQPLFAFEWRDPGMGISGQLTWTRLPQGFKNSPTLFNEALHRDLADFRIQHPDLILLQYVDDILLAATSELDCQQGTRALLLTLGNLGYRASAKKAQLCQKQVKYLGYLLKEGQRWLTEARKETVMGQPTPKTPRQLREFLGKAGFCRLFIPGFAEMAAPLYPLTKPGTLFNWGPDQQKAYQEIKQALLTAPALGLPDLTKPFELFVDEKQGYAKGVLTQKLGPWRRPVAYLSKKLDPVAAGWPPCLRMVAAIAVLRKDAGKLTMGQPLVILAPHAVEALVKQPPDRWLSNARMTHYQAMLLDTDRVQFGPVVALNPATLLPLPEEGAPHDCLEILAETHGTRPDLTDQPIPDADHTWYTDGSSFLQEGQRKAGAAVTTETEVIWARALPAGTSAQRAELIALTQALKMAEGKRLNVYTDSRYAFATAHIHGEIYRRRGWLTSEGREIKNKSEILALLKALFLPKRLSIIHCLGHQKGDSAEARGNRLADQAAREAAIKTPPDTSTLLAGKRTADGSEFEKRTADGSEFESPKKKAKVE

SEQ ID NO: 7157 - protein, 2094 aa, synthetic construct
MPAAKRVKLDGGDKKYSIGLDIGTNSVGWAVITDEYKVPSKKFKVLGNTDRHSIKKNLIGALLFDSGETAEATRLKRTARRRYTRRKNRICYLQEIFSNEMAKVDDSFFHRLEESFLVEEDKKHERHPIFGNIVDEVAYHEKYPTIYHLRKKLVDSTDKADLRLIYLALAHMIKFRGHFLIEGDLNPDNSDVDKLFIQLVQTYNQLFEENPINASGVDAKAILSARLSKSRRLENLIAQLPGEKKNGLFGNLIALSLGLTPNFKSNFDLAEDAKLQLSKDTYDDDLDNLLAQIGDQYADLFLAAKNLSDAILLSDILRVNTEITKAPLSASMIKRYDEHHQDLTLLKALVRQQLPEKYKEIFFDQSKNGYAGYIDGGASQEEFYKFIKPILEKMDGTEELLVKLNREDLLRKQRTFDNGSIPHQIHLGELHAILRRQEDFYPFLKDNREKIEKILTFRIPYYVGPLARGNSRFAWMTRKSEETITPWNFEEVVDKGASAQSFIERMTNFDKNLPNEKVLPKHSLLYEYFTVYNELTKVKYVTEGMRKPAFLSGEQKKAIVDLLFKTNRKVTVKQLKEDYFKKIECFDSVEISGVEDRFNASLGTYHDLLKIIKDKDFLDNEENEDILEDIVLTLTLFEDREMIEERLKTYAHLFDDKVMKQLKRRRYTGWGRLSRKLINGIRDKQSGKTILDFLKSDGFANRNFMQLIHDDSLTFKEDIQKAQVSGQGDSLHEHIANLAGSPAIKKGILQTVKVVDELVKVMGRHKPENIVIEMARENQTTQKGQKNSRERMKRIEEGIKELGSQILKEHPVENTQLQNEKLYLYYLQNGRDMYVDQELDINRLSDYDVDHIVPQSFLKDDSIDNKVLTRSDKARGKSDNVPSEEVVKKMKNYWRQLLNAKLITQRKFDNLTKAERGGLSELDKAGFIKRQLVETRQITKHVAQILDSRMNTKYDENDKLIREVKVITLKSKLVSDFRKDFQFYKVREINNYHHAHDAYLNAVVGTALIKKYPKLESEFVYGDYKVYDVRKMIAKSEQEIGKATAKYFFYSNIMNFFKTEITLANGEIRKRPLIETNGETGEIVWDKGRDFATVRKVLSMPQVNIVKKTEVQTGGFSKESILPKRNSDKLIARKKDWDPKKYGGFDSPTVAYSVLVVAKVEKGKSKKLKSVKELLGITIMERSSFEKNPIDFLEAKGYKEVKKDLIIKLPKYSLFELENGRKRMLASAGELQKGNELALPSKYVNFLYLASHYEKLKGSPEDNEQKQLFVEQHKHYLDEIIEQISEFSKRVILADANLDKVLSAYNKHRDKPIREQAENIIHLFTLTNLGAPAAFKYFDTTIDRKRYTSTKEVLDATLIHQSITGLYETRIDLSQLGGDGGGSSPAPGGSGGTLNIEDEHRLHETSKEPDVSLGSTWLSDFPQAWAETGGMGLAVRQAPLIIPLKATSTPVSIKQYPMSQEARLGIKPHIQRLLDQGILVPCQSPWNTPLLPVKKPGTNDYRPVQDLREVNKRVEDIHPTVPNPYNLLSGLPPSHQWYTVLDLKDAFFCLRLHPTSQPLFAFEWRDPEMGISGQLTWTRLPQGFKNSPTLFNEALHRDLADFRIQHPDLILLQYVDDLLLAATSELDCQQGTRALLQTLGNLGYRASAKKAQICQKQVKYLGYLLKEGQRWLTEARKETVMGQPTPKTPRQLREFLGTAGFCRLWIPGFAEMAAPLYPLTKPGTLFNWGPDQQKAYQEIKQALLTAPALGLPDLTKPFELFVDEKQGYAKGVLTQKLGPWRRPVAYLSKKLDPVAAGWPPCLRMVAAIAVLTKDAGKLTMGQPLVILAPHAVEALVKQPPDRWLSNARMTHYQALLLDTDRVQFGPVVALNPATLLPLPEEGLQHNCLDILAEAHGTRPDLTDQPLPDADHTWYTDGSSLLQEGQRKAGAAVTTETEVIWAKALPAGTSAQRAELIALTQALKMAEGKKLNVYTDSRYAFATAHIHGEIYRRRGWLTSEGKEIKNKDEILALLKALFLPKRLSIIHCPGHQKGHSAEARGNRMADQAARKAAITETPDTSTLLAGKRTADGSEFEKRTADGSEFESPKKKAKVE

SEQ ID NO: 7158 - protein, 2094 aa, synthetic construct
MPAAKRVKLDGGDKKYSIGLDIGTNSVGWAVITDEYKVPSKKFKVLGNTDRHSIKKNLIGALLFDSGETAEATRLKRTARRRYTRRKNRICYLQEIFSNEMAKVDDSFFHRLEESFLVEEDKKHERHPIFGNIVDEVAYHEKYPTIYHLRKKLVDSTDKADLRLIYLALAHMIKFRGHFLIEGDLNPDNSDVDKLFIQLVQTYNQLFEENPINASGVDAKAILSARLSKSRRLENLIAQLPGEKKNGLFGNLIALSLGLTPNFKSNFDLAEDAKLQLSKDTYDDDLDNLLAQIGDQYADLFLAAKNLSDAILLSDILRVNTEITKAPLSASMIKRYDEHHQDLTLLKALVRQQLPEKYKEIFFDQSKNGYAGYIDGGASQEEFYKFIKPILEKMDGTEELLVKLNREDLLRKQRTFDNGSIPHQIHLGELHAILRRQEDFYPFLKDNREKIEKILTFRIPYYVGPLARGNSRFAWMTRKSEETITPWNFEEVVDKGASAQSFIERMTNFDKNLPNEKVLPKHSLLYEYFTVYNELTKVKYVTEGMRKPAFLSGEQKKAIVDLLFKTNRKVTVKQLKEDYFKKIECFDSVEISGVEDRFNASLGTYHDLLKIIKDKDFLDNEENEDILEDIVLTLTLFEDREMIEERLKTYAHLFDDKVMKQLKRRRYTGWGRLSRKLINGIRDKQSGKTILDFLKSDGFANRNFMQLIHDDSLTFKEDIQKAQVSGQGDSLHEHIANLAGSPAIKKGILQTVKVVDELVKVMGRHKPENIVIEMARENQTTQKGQKNSRERMKRIEEGIKELGSQILKEHPVENTQLQNEKLYLYYLQNGRDMYVDQELDINRLSDYDVDHIVPQSFLKDDSIDNKVLTRSDKARGKSDNVPSEEVVKKMKNYWRQLLNAKLITQRKFDNLTKAERGGLSELDKAGFIKRQLVETRQITKHVAQILDSRMNTKYDENDKLIREVKVITLKSKLVSDFRKDFQFYKVREINNYHHAHDAYLNAVVGTALIKKYPKLESEFVYGDYKVYDVRKMIAKSEQEIGKATAKYFFYSNIMNFFKTEITLANGEIRKRPLIETNGETGEIVWDKGRDFATVRKVLSMPQVNIVKKTEVQTGGFSKESILPKRNSDKLIARKKDWDPKKYGGFDSPTVAYSVLVVAKVEKGKSKKLKSVKELLGITIMERSSFEKNPIDFLEAKGYKEVKKDLIIKLPKYSLFELENGRKRMLASAGELQKGNELALPSKYVNFLYLASHYEKLKGSPEDNEQKQLFVEQHKHYLDEIIEQISEFSKRVILADANLDKVLSAYNKHRDKPIREQAENIIHLFTLTNLGAPAAFKYFDTTIDRKRYTSTKEVLDATLIHQSITGLYETRIDLSQLGGDGGGSSPAPGGSGGTLNIEDEHRLHETSKEPDVSLGSTWLSDFPQAWAETGGMGLAVRQAPLIIPLKATSTPVSIKQYPMSQEARLGIKPHIQRLLDQGILVPCQSPWNTPLLPVKKPGTNDYRPVQDLREVNKRVEDIHPTVPNPYNLLSGLPPSHQWYTVLDLKDAFFCLRLHPTSQPLFAFEWRDPEMGISGQLTWTRLPQGFKNSPTLFNEALHRDLADFRIQHPDLILLQYVDDLLLAATSELDCQQGTRALLQTLGNLGYRASAKKAQICQKQVKYLGYLLKEGQRWLTEARKETVMGQPTPKTPRQLREFLGKAGFCRLFIPGFAEMAAPLYPLTKPGTLFNWGPDQQKAYQEIKQALLTAPALGLPDLTKPFELFVDEKQGYAKGVLTQKLGPWRRPVAYLSKKLDPVAAGWPPCLRMVAAIAVLTKDAGKLTMGQPLVILAPHAVEALVKQPPDRWLSNARMTHYQALLLDTDRVQFGPVVALNPATLLPLPEEGLQHNCLDILAEAHGTRPDLTDQPLPDADHTWYTDGSSLLQEGQRKAGAAVTTETEVIWAKALPAGTSAQRAELIALTQALKMAEGKKLNVYTDSRYAFATAHIHGEIYRRRGWLTSEGKEIKNKDEILALLKALFLPKRLSIIHCPGHQKGHSAEARGNRMADQAARKAAITETPDTSTLLAGKRTADGSEFEKRTADGSEFESPKKKAKVE

SEQ ID NO: 7159 - protein, 2094 aa, synthetic construct; identical to SEQ ID NO: 7157

SEQ ID NO: 7160 - protein, 2094 aa, synthetic construct; identical to SEQ ID NO: 7158

SEQ ID NO: 7161 - protein, 2085 aa, synthetic construct
MPAAKRVKLDGGDKKYSIGLDIGTNSVGWAVITDEYKVPSKKFKVLGNTDRHSIKKNLIGALLFDSGETAEATRLKRTARRRYTRRKNRICYLQEIFSNEMAKVDDSFFHRLEESFLVEEDKKHERHPIFGNIVDEVAYHEKYPTIYHLRKKLVDSTDKADLRLIYLALAHMIKFRGHFLIEGDLNPDNSDVDKLFIQLVQTYNQLFEENPINASGVDAKAILSARLSKSRRLENLIAQLPGEKKNGLFGNLIALSLGLTPNFKSNFDLAEDAKLQLSKDTYDDDLDNLLAQIGDQYADLFLAAKNLSDAILLSDILRVNTEITKAPLSASMIKRYDEHHQDLTLLKALVRQQLPEKYKEIFFDQSKNGYAGYIDGGASQEEFYKFIKPILEKMDGTEELLVKLNREDLLRKQRTFDNGSIPHQIHLGELHAILRRQEDFYPFLKDNREKIEKILTFRIPYYVGPLARGNSRFAWMTRKSEETITPWNFEEVVDKGASAQSFIERMTNFDKNLPNEKVLPKHSLLYEYFTVYNELTKVKYVTEGMRKPAFLSGEQKKAIVDLLFKTNRKVTVKQLKEDYFKKIECFDSVEISGVEDRFNASLGTYHDLLKIIKDKDFLDNEENEDILEDIVLTLTLFEDREMIEERLKTYAHLFDDKVMKQLKRRRYTGWGRLSRKLINGIRDKQSGKTILDFLKSDGFANRNFMQLIHDDSLTFKEDIQKAQVSGQGDSLHEHIANLAGSPAIKKGILQTVKVVDELVKVMGRHKPENIVIEMARENQTTQKGQKNSRERMKRIEEGIKELGSQILKEHPVENTQLQNEKLYLYYLQNGRDMYVDQELDINRLSDYDVDHIVPQSFLKDDSIDNKVLTRSDKARGKSDNVPSEEVVKKMKNYWRQLLNAKLITQRKFDNLTKAERGGLSELDKAGFIKRQLVETRQITKHVAQILDSRMNTKYDENDKLIREVKVITLKSKLVSDFRKDFQFYKVREINNYHHAHDAYLNAVVGTALIKKYPKLESEFVYGDYKVYDVRKMIAKSEQEIGKATAKYFFYSNIMNFFKTEITLANGEIRKRPLIETNGETGEIVWDKGRDFATVRKVLSMPQVNIVKKTEVQTGGFSKESILPKRNSDKLIARKKDWDPKKYGGFDSPTVAYSVLVVAKVEKGKSKKLKSVKELLGITIMERSSFEKNPIDFLEAKGYKEVKKDLIIKLPKYSLFELENGRKRMLASAGELQKGNELALPSKYVNFLYLASHYEKLKGSPEDNEQKQLFVEQHKHYLDEIIEQISEFSKRVILADANLDKVLSAYNKHRDKPIREQAENIIHLFTLTNLGAPAAFKYFDTTIDRKRYTSTKEVLDATLIHQSITGLYETRIDLSQLGGDGGGSSPAPGGSGGIPWLMKKPLQLTTLVPLQEYEERLLKQTMLTGSYKEKLQSLFLKYDALWQHWENQVGHRRIKPHHIATGTVNPRPQKQYPINPKAKASIQTVINDLLKQGVLIQQNSIMNTPVYPVPKPDGKWRMVLDYREVNKTIPLIAAQNQHSAGILSSIFRGKYKTTLDLSNGFWAHSITPESYWLTAFTWLGQQYCWTRLPQGFLNSPALFNADVVDLLKEVPNVQVYVDDIYISHDDPREHLEQLEKVFSLLLNAGYVVSLKKSEIAQHEVEFLGFNITKEGRGLTETFKQKLLNITPPRDLKQLQSILGKLNFARNFIPNFSELVKPLYNIIATAPGKYITWTTDNSQQLQNIISMLNSAENLEERNPEVRLIMKVNTSPSAGYIRFYNEFAKRPIMYLNYVYTKAEVKFTNTEKLLTTIHKGLIKALDLGMGQEILVYSPIVSMTKIQKTPLPERKALPIRWITWMSYLEDPRIQFHYDKTLPELQQVPTVTDDIIAKIKHPSEFSMVFYTDGSAIKHPNVNKSHNAGMGIAQVQFKPEFTVINTWSIPLGDHTAQLAEVAAVEFACKKALKIDGPVLIVTDSFYVAESVNKELPYWQSNGFFNNKKKPLKHVSKWKSIADCIQLKPDIIIIHEKGHQPTASTFHTEGNNLADKLATQGSYVVNAGKRTADGSEFEKRTADGSEFESPKKKAKVE

SEQ ID NO: 7162 - protein, 2092 aa, synthetic construct
MPAAKRVKLDGGDKKYSIGLDIGTNSVGWAVITDEYKVPSKKFKVLGNTDRHSIKKNLIGALLFDSGETAEATRLKRTARRRYTRRKNRICYLQEIFSNEMAKVDDSFFHRLEESFLVEEDKKHERHPIFGNIVDEVAYHEKYPTIYHLRKKLVDSTDKADLRLIYLALAHMIKFRGHFLIEGDLNPDNSDVDKLFIQLVQTYNQLFEENPINASGVDAKAILSARLSKSRRLENLIAQLPGEKKNGLFGNLIALSLGLTPNFKSNFDLAEDAKLQLSKDTYDDDLDNLLAQIGDQYADLFLAAKNLSDAILLSDILRVNTEITKAPLSASMIKRYDEHHQDLTLLKALVRQQLPEKYKEIFFDQSKNGYAGYIDGGASQEEFYKFIKPILEKMDGTEELLVKLNREDLLRKQRTFDNGSIPHQIHLGELHAILRRQEDFYPFLKDNREKIEKILTFRIPYYVGPLARGNSRFAWMTRKSEETITPWNFEEVVDKGASAQSFIERMTNFDKNLPNEKVLPKHSLLYEYFTVYNELTKVKYVTEGMRKPAFLSGEQKKAIVDLLFKTNRKVTVKQLKEDYFKKIECFDSVEISGVEDRFNASLGTYHDLLKIIKDKDFLDNEENEDILEDIVLTLTLFEDREMIEERLKTYAHLFDDKVMKQLKRRRYTGWGRLSRKLINGIRDKQSGKTILDFLKSDGFANRNFMQLIHDDSLTFKEDIQKAQVSGQGDSLHEHIANLAGSPAIKKGILQTVKVVDELVKVMGRHKPENIVIEMARENQTTQKGQKNSRERMKRIEEGIKELGSQILKEHPVENTQLQNEKLYLYYLQNGRDMYVDQELDINRLSDYDVDHIVPQSFLKDDSIDNKVLTRSDKARGKSDNVPSEEVVKKMKNYWRQLLNAKLITQRKFDNLTKAERGGLSELDKAGFIKRQLVETRQITKHVAQILDSRMNTKYDENDKLIREVKVITLKSKLVSDFRKDFQFYKVREINNYHHAHDAYLNAVVGTALIKKYPKLESEFVYGDYKVYDVRKMIAKSEQEIGKATAKYFFYSNIMNFFKTEITLANGEIRKRPLIETNGETGEIVWDKGRDFATVRKVLSMPQVNIVKKTEVQTGGFSKESILPKRNSDKLIARKKDWDPKKYGGFDSPTVAYSVLVVAKVEKGKSKKLKSVKELLGITIMERSSFEKNPIDFLEAKGYKEVKKDLIIKLPKYSLFELENGRKRMLASAGELQKGNELALPSKYVNFLYLASHYEKLKGSPEDNEQKQLFVEQHKHYLDEIIEQISEFSKRVILADANLDKVLSAYNKHRDKPIREQAENIIHLFTLTNLGAPAAFKYFDTTIDRKRYTSTKEVLDATLIHQSITGLYETRIDLSQLGGDGGGSSPAPGGSGGVLNLEEEYRLHEKPVPSSIDPSWLQLFPTVWAERAGMGLANQVPPVVVELRSGASPVAVRQYPMSKEAREGIRPHIQRFLDLGVLVPCQSPWNTPLLPVKKPGTNDYRPVQDLREINKRVQDIHPTVPNPYNLLSSLPPSHTWYSVLDLKDAFFCLKLHPNSQPLFAFEWRDPEKGNTGQLTWTRLPQGFKNSPTLFNEALHRDLAPFRALNPQVVLLQYVDDLLVAAPTYRDCKEGTQKLLQELSKLGYRVSAKKAQLCQKEVTYLGYLLKEGKRWLTPARKATVMKIPPPTTPRQVREFLGKAGFCRLFIPGFASLAAPLYPLTKPSIPFIWTEEHQKAFDRIKEALLSAPALALPDLTKPFTLYVDERAGVARGVLTQTLGPWRRPVAYLSKKLDPVASGWPTCLKAVAAVALLLKDADKLTLGQNVTVIASHSLESIVRQPPDRWMTNARMTHYQSLLLNERVSFAPPAVLNPATLLPVESEATPVHRCSEILAEETGTRRDLKDQPLPGVPAWYTDGSSFIAEGKRRAGAAIVDGKRTVWASSLPEGTSAQKAELVALTQALRLAEGKDINIYTDSRYAFATAHIHGAIYKQRGWLTSAGKDIKNKEEILALLEAIHLPKRVAIIHCPGHQKGNDPVATGNRRADEAAKQAALSTRVLAETTKPAGKRTADGSEFEKRTADGSEFESPKKKAKVE

SEQ ID NO: 7163 - protein, 2096 aa, synthetic construct
MPAAKRVKLDGGDKKYSIGLDIGTNSVGWAVITDEYKVPSKKFKVLGNTDRHSIKKNLIGALLFDSGETAEATRLKRTARRRYTRRKNRICYLQEIFSNEMAKVDDSFFHRLEESFLVEEDKKHERHPIFGNIVDEVAYHEKYPTIYHLRKKLVDSTDKADLRLIYLALAHMIKFRGHFLIEGDLNPDNSDVDKLFIQLVQTYNQLFEENPINASGVDAKAILSARLSKSRRLENLIAQLPGEKKNGLFGNLIALSLGLTPNFKSNFDLAEDAKLQLSKDTYDDDLDNLLAQIGDQYADLFLAAKNLSDAILLSDILRVNTEITKAPLSASMIKRYDEHHQDLTLLKALVRQQLPEKYKEIFFDQSKNGYAGYIDGGASQEEFYKFIKPILEKMDGTEELLVKLNREDLLRKQRTFDNGSIPHQIHLGELHAILRRQEDFYPFLKDNREKIEKILTFRIPYYVGPLARGNSRFAWMTRKSEETITPWNFEEVVDKGASAQSFIERMTNFDKNLPNEKVLPKHSLLYEYFTVYNELTKVKYVTEGMRKPAFLSGEQKKAIVDLLFKTNRKVTVKQLKEDYFKKIECFDSVEISGVEDRFNASLGTYHDLLKIIKDKDFLDNEENEDILEDIVLTLTLFEDREMIEERLKTYAHLFDDKVMKQLKRRRYTGWGRLSRKLINGIRDKQSGKTILDFLKSDGFANRNFMQLIHDDSLTFKEDIQKAQVSGQGDSLHEHIANLAGSPAIKKGILQTVKVVDELVKVMGRHKPENIVIEMARENQTTQKGQKNSRERMKRIEEGIKELGSQILKEHPVENTQLQNEKLYLYYLQNGRDMYVDQELDINRLSDYDVDHIVPQSFLKDDSIDNKVLTRSDKARGKSDNVPSEEVVKKMKNYWRQLLNAKLITQRKFDNLTKAERGGLSELDKAGFIKRQLVETRQITKHVAQILDSRMNTKYDENDKLIREVKVITLKSKLVSDFRKDFQFYKVREINNYHHAHDAYLNAVVGTALIKKYPKLESEFVYGDYKVYDVRKMIAKSEQEIGKATAKYFFYSNIMNFFKTEITLANGEIRKRPLIETNGETGEIVWDKGRDFATVRKVLSMPQVNIVKKTEVQTGGFSKESILPKRNSDKLIARKKDWDPKKYGGFDSPTVAYSVLVVAKVEKGKSKKLKSVKELLGITIMERSSFEKNPIDFLEAKGYKEVKKDLIIKLPKYSLFELENGRKRMLASAGELQKGNELALPSKYVNFLYLASHYEKLKGSPEDNEQKQLFVEQHKHYLDEIIEQISEFSKRVILADANLDKVLSAYNKHRDKPIREQAENIIHLFTLTNLGAPAAFKYFDTTIDRKRYTSTKEVLDATLIHQSITGLYETRIDLSQLGGDGGPAPGGSGSSGGTAPLEEEYRLFLEAPIQNVTLLEQWKREIPKVWAEINPPGLASTQAPIHVQLLSTALPVRVRQYPITLEAKRSLRETIRKFRAAGILRPVHSPWNTPLLPVRKSGTSEYRMVQDLREVNKRVETIHPTVPNPYTLLSLLPPDRIWYSVLDLKDAFFCIPLAPESQLIFAFEWADAEEGESGQLTWTRLPQGFKNSPTLFNEALNRDLQGFRLDHPSVSLLQYVDDLLIAADTQAACLSATRDLLMTLAELGYRVSGKKAQLCQEEVTYLGFKIHKGSRSLSNSRTQAILQIPVPKTKRQVREFLGTIGYCRLWIPGFAELAQPLYAATRPGNDPLVWGEKEEEAFQSLKLALTQPPALALPSLDKPFQLFVEETSGAAKGVLTQALGPWKRPVAYLSKRLDPVAAGWPRCLRAIAAAALLTREASKLTFGQDIEITSSHNLESLLRSPPDKWLTNARITQYQVLLLDPPRVRFKQTAALNPATLLPETDDTLPIHHCLDTLDSLTSTRPDLTDQPLAQAEATLFTDGSSYIRDGKRYAGAAVVTLDSVIWAEPLPIGTSAQKAELIALTKALEWSKDKSVNIYTDSRYAFATLHVHGMIYRERGWLTAGGKAIKNAPEILALLTAVWLPKRVAVMHCKGHQKDDAPTSTGNRRADEVAREVAIRPLSTQATISAGKRTADGSEFEKRTADGSEFESPKKKAKVE

SEQ ID NO: 7164 - protein, 2093 aa, synthetic construct
MPAAKRVKLDGGDKKYSIGLDIGTNSVGWAVITDEYKVPSKKFKVLGNTDRHSIKKNLIGALLFDSGETAEATRLKRTARRRYTRRKNRICYLQEIFSNEMAKVDDSFFHRLEESFLVEEDKKHERHPIFGNIVDEVAYHEKYPTIYHLRKKLVDSTDKADLRLIYLALAHMIKFRGHFLIEGDLNPDNSDVDKLFIQLVQTYNQLFEENPINASGVDAKAILSARLSKSRRLENLIAQLPGEKKNGLFGNLIALSLGLTPNFKSNFDLAEDAKLQLSKDTYDDDLDNLLAQIGDQYADLFLAAKNLSDAILLSDILRVNTEITKAPLSASMIKRYDEHHQDLTLLKALVRQQLPEKYKEIFFDQSKNGYAGYIDGGASQEEFYKFIKPILEKMDGTEELLVKLNREDLLRKQRTFDNGSIPHQIHLGELHAILRRQEDFYPFLKDNREKIEKILTFRIPYYVGPLARGNSRFAWMTRKSEETITPWNFEEVVDKGASAQSFIERMTNFDKNLPNEKVLPKHSLLYEYFTVYNELTKVKYVTEGMRKPAFLSGEQKKAIVDLLFKTNRKVTVKQLKEDYFKKIECFDSVEISGVEDRFNASLGTYHDLLKIIKDKDFLDNEENEDILEDIVLTLTLFEDREMIEERLKTYAHLFDDKVMKQLKRRRYTGWGRLSRKLINGIRDKQSGKTILDFLKSDGFANRNFMQLIHDDSLTFKEDIQKAQVSGQGDSLHEHIANLAGSPAIKKGILQTVKVVDELVKVMGRHKPENIVIEMARENQTTQKGQKNSRERMKRIEEGIKELGSQILKEHPVENTQLQNEKLYLYYLQNGRDMYVDQELDINRLSDYDVDHIVPQSFLKDDSIDNKVLTRSDKARGKSDNVPSEEVVKKMKNYWRQLLNAKLITQRKFDNLTKAERGGLSELDKAGFIKRQLVETRQITKHVAQILDSRMNTKYDENDKLIREVKVITLKSKLVSDFRKDFQFYKVREINNYHHAHDAYLNAVVGTALIKKYPKLESEFVYGDYKVYDVRKMIAKSEQEIGKATAKYFFYSNIMNFFKTEITLANGEIRKRPLIETNGETGEIVWDKGRDFATVRKVLSMPQVNIVKKTEVQTGGFSKESILPKRNSDKLIARKKDWDPKKYGGFDSPTVAYSVLVVAKVEKGKSKKLKSVKELLGITIMERSSFEKNPIDFLEAKGYKEVKKDLIIKLPKYSLFELENGRKRMLASAGELQKGNELALPSKYVNFLYLASHYEKLKGSPEDNEQKQLFVEQHKHYLDEIIEQISEFSKRVILADANLDKVLSAYNKHRDKPIREQAENIIHLFTLTNLGAPAAFKYFDTTIDRKRYTSTKEVLDATLIHQSITGLYETRIDLSQLGGDGGPAPGGSGSSGGTLQLEEEYRLFEPESTQKQEMDIWLKNFPQAWAETGGMGTAHCQAPVLIQLKATATPISIRQYPMPHEAYQGIKPHIRRMLDQGILKPCQSPWNTPLLPVKKPGTEDYRPVQDLREVNKRVEDIHPTVPNPYNLLSTLPPSHPWYTVLDLKDAFFCLRLHSESQLLFAFEWRDPEIGLSGQLTWTRLPQGFKNSPTLFNEALHSDLADFRVRYPALVLLQYVDDLLLAAATRTECLEGTKALLETLGNKGYRASAKKAQICLQEVTYLGYSLKDGQRWLTKARKEAILSIPVPKNSRQVREFLGKAGYCRLFIPGFAELAAPLYPLTRPGTLFQWGTEQQLAFEDIKKALLSSPALGLPDITKPFELFIDENSGFAKGVLVQKLGPWKRPVAYLSKKLDTVASGWPPCLRMVAAIAILVKDAGKLTLGQPLTILTSHPVEALVRQPPNKWLSNARMTHYQAMLLDAERVHFGPTVSLNPATLLPLPSGGNHHDCLQILAETHGTRPDLTDQPLPDADLTWYTDGSSFIRNGEREAGAAVTTESEVIWAAPLPPGTSAQRAELIALTQALKMAEGKKLTVYTDSRYAFATTHVHGEIYRRRGWLTSEGKEIKNKNEILALLEALFLPKRLSIIHCPGHQKGDSPQAKGNRLADDTAKKAATETHSSLTVLPAGKRTADGSEFEKRTADGSEFESPKKKAKVE

SEQ ID NO: 7165 - protein, 2174 aa, synthetic construct
MPAAKRVKLDGGDKKYSIGLDIGTNSVGWAVITDEYKVPSKKFKVLGNTDRHSIKKNLIGALLFDSGETAEATRLKRTARRRYTRRKNRICYLQEIFSNEMAKVDDSFFHRLEESFLVEEDKKHERHPIFGNIVDEVAYHEKYPTIYHLRKKLVDSTDKADLRLIYLALAHMIKFRGHFLIEGDLNPDNSDVDKLFIQLVQTYNQLFEENPINASGVDAKAILSARLSKSRRLENLIAQLPGEKKNGLFGNLIALSLGLTPNFKSNFDLAEDAKLQLSKDTYDDDLDNLLAQIGDQYADLFLAAKNLSDAILLSDILRVNTEITKAPLSASMIKRYDEHHQDLTLLKALVRQQLPEKYKEIFFDQSKNGYAGYIDGGASQEEFYKFIKPILEKMDGTEELLVKLNREDLLRKQRTFDNGSIPHQIHLGELHAILRRQEDFYPFLKDNREKIEKILTFRIPYYVGPLARGNSRFAWMTRKSEETITPWNFEEVVDKGASAQSFIERMTNFDKNLPNEKVLPKHSLLYEYFTVYNELTKVKYVTEGMRKPAFLSGEQKKAIVDLLFKTNRKVTVKQLKEDYFKKIECFDSVEISGVEDRFNASLGTYHDLLKIIKDKDFLDNEENEDILEDIVLTLTLFEDREMIEERLKTYAHLFDDKVMKQLKRRRYTGWGRLSRKLINGIRDKQSGKTILDFLKSDGFANRNFMQLIHDDSLTFKEDIQKAQVSGQGDSLHEHIANLAGSPAIKKGILQTVKVVDELVKVMGRHKPENIVIEMARENQTTQKGQKNSRERMKRIEEGIKELGSQILKEHPVENTQLQNEKLYLYYLQNGRDMYVDQELDINRLSDYDVDHIVPQSFLKDDSIDNKVLTRSDKARGKSDNVPSEEVVKKMKNYWRQLLNAKLITQRKFDNLTKAERGGLSELDKAGFIKRQLVETRQITKHVAQILDSRMNTKYDENDKLIREVKVITLKSKLVSDFRKDFQFYKVREINNYHHAHDAYLNAVVGTALIKKYPKLESEFVYGDYKVYDVRKMIAKSEQEIGKATAKYFFYSNIMNFFKTEITLANGEIRKRPLIETNGETGEIVWDKGRDFATVRKVLSMPQVNIVKKTEVQTGGFSKESILPKRNSDKLIARKKDWDPKKYGGFDSPTVAYSVLVVAKVEKGKSKKLKSVKELLGITIMERSSFEKNPIDFLEAKGYKEVKKDLIIKLPKYSLFELENGRKRMLASAGELQKGNELALPSKYVNFLYLASHYEKLKGSPEDNEQKQLFVEQHKHYLDEIIEQISEFSKRVILADANLDKVLSAYNKHRDKPIREQAENIIHLFTLTNLGAPAAFKYFDTTIDRKRYTSTKEVLDATLIHQSITGLYETRIDLSQLGGDGGPAPGGSGSSGGMNPLQLLQPLPAEIKGTKLLAHWNSGATITCIPESFLEDEQPIKKTLIKTIHGEKQQNVYYVTFKVKGRKVEAEVIASPYEYILLSPTDVPWLTQQPLQLTILVPLQEYQEKILSKTALPEDQKQQLKTLFVKYDNLWQHWENQVGHRKIRPHNIATGDYPPRPQKQYPINPKAKPSIQIVIDDLLKQGVLTPQNSTMNTPVYPVPKPDGRWRMVLDYREVNKTIPLTAAQNQHSAGILATIVRQKYKTTLDLANGFWAHPITPESYWLTAFTWQGKQYCWTRLPQGFLNSPALFTADVVDLLKEIPNVQVYVDDIYLSHDDPKEHVQQLEKVFQILLQAGYVVSLKKSEIGQKTVEFLGFNITKEGRGLTDTFKTKLLNITPPKDLKQLQSILGLLNFARNFIPNFAELVQPLYNLIASAKGKYIEWSEENTKQLNMVIEALNTASNLEERLPEQRLVIKVNTSPSAGYVRYYNETGKKPIMYLNYVFSKAELKFSMLEKLLTTMHKALIKAMDLAMGQEILVYSPIVSMTKIQKTPLPERKALPIRWITWMTYLEDPRIQFHYDKTLPELKHIPDVYTSSQSPVKHPSQYEGVFYTDGSAIKSPDPTKSNNAGMGIVHATYKPEYQVLNQWSIPLGNHTAQMAEIAAVEFACKKALKIPGPVLVITDSFYVAESANKELPYWKSNGFVNNKKKPLKHISKWKSIAECLSMKPDITIQHEKGISLQIPVFILKGNALADKLATQGSYVVNAGKRTADGSEFEKRTADGSEFESPKKKAKVE

SEQ ID NO: 7166 - protein, 2085 aa, synthetic construct
MPAAKRVKLDGGDKKYSIGLDIGTNSVGWAVITDEYKVPSKKFKVLGNTDRHSIKKNLIGALLFDSGETAEATRLKRTARRRYTRRKNRICYLQEIFSNEMAKVDDSFFHRLEESFLVEEDKKHERHPIFGNIVDEVAYHEKYPTIYHLRKKLVDSTDKADLRLIYLALAHMIKFRGHFLIEGDLNPDNSDVDKLFIQLVQTYNQLFEENPINASGVDAKAILSARLSKSRRLENLIAQLPGEKKNGLFGNLIALSLGLTPNFKSNFDLAEDAKLQLSKDTYDDDLDNLLAQIGDQYADLFLAAKNLSDAILLSDILRVNTEITKAPLSASMIKRYDEHHQDLTLLKALVRQQLPEKYKEIFFDQSKNGYAGYIDGGASQEEFYKFIKPILEKMDGTEELLVKLNREDLLRKQRTFDNGSIPHQIHLGELHAILRRQEDFYPFLKDNREKIEKILTFRIPYYVGPLARGNSRFAWMTRKSEETITPWNFEEVVDKGASAQSFIERMTNFDKNLPNEKVLPKHSLLYEYFTVYNELTKVKYVTEGMRKPAFLSGEQKKAIVDLLFKTNRKVTVKQLKEDYFKKIECFDSVEISGVEDRFNASLGTYHDLLKIIKDKDFLDNEENEDILEDIVLTLTLFEDREMIEERLKTYAHLFDDKVMKQLKRRRYTGWGRLSRKLINGIRDKQSGKTILDFLKSDGFANRNFMQLIHDDSLTFKEDIQKAQVSGQGDSLHEHIANLAGSPAIKKGILQTVKVVDELVKVMGRHKPENIVIEMARENQTTQKGQKNSRERMKRIEEGIKELGSQILKEHPVENTQLQNEKLYLYYLQNGRDMYVDQELDINRLSDYDVDHIVPQSFLKDDSIDNKVLTRSDKARGKSDNVPSEEVVKKMKNYWRQLLNAKLITQRKFDNLTKAERGGLSELDKAGFIKRQLVETRQITKHVAQILDSRMNTKYDENDKLIREVKVITLKSKLVSDFRKDFQFYKVREINNYHHAHDAYLNAVVGTALIKKYPKLESEFVYGDYKVYDVRKMIAKSEQEIGKATAKYFFYSNIMNFFKTEITLANGEIRKRPLIETNGETGEIVWDKGRDFATVRKVLSMPQVNIVKKTEVQTGGFSKESILPKRNSDKLIARKKDWDPKKYGGFDSPTVAYSVLVVAKVEKGKSKKLKSVKELLGITIMERSSFEKNPIDFLEAKGYKEVKKDLIIKLPKYSLFELENGRKRMLASAGELQKGNELALPSKYVNFLYLASHYEKLKGSPEDNEQKQLFVEQHKHYLDEIIEQISEFSKRVILADANLDKVLSAYNKHRDKPIREQAENIIHLFTLTNLGAPAAFKYFDTTIDRKRYTSTKEVLDATLIHQSITGLYETRIDLSQLGGDGGPAPGGSGSSGGVPWLTQQPLQLTILVPLQEYQEKILSKTALPEDQKQQLKTLFVKYDNLWQHWENQVGHRKIRPHNIATGDYPPRPQKQYPINPKAKPSIQIVIDDLLKQGVLTPQNSTMNTPVYPVPKPDGRWRMVLDYREVNKTIPLTAAQNQHSAGILATIVRQKYKTTLDLANGFWAHPITPESYWLTAFTWQGKQYCWTRLPQGFLNSPALFNADVVDLLKEIPNVQVYVDDIYLSHDDPKEHVQQLEKVFQILLQAGYVVSLKKSEIGQKTVEFLGFNITKEGRGLTDTFKTKLLNITPPKDLKQLQSILGLLNFARNFIPNFAELVQPLYNLIAPAKGKYIEWSEENTKQLNMVIEALNTASNLEERLPEQRLVIKVNTSPSAGYVRYYNETGKKPIMYLNYVFSKAELKFSMLEKLLTTMHKALIKAMDLAMGQEILVYSPIVSMTKIQKTPLPERKALPIRWITWMTYLEDPRIQFHYDKTLPELKHIPDVYTSSQSPVKHPSQYEGVFYTDGSAIKSPDPTKSNNAGMGIVHATYKPEYQVLNQWSIPLGNHTAQMAEIAAVEFACKKALKIPGPVLVITDSFYVAESANKELPYWKSNGFVNNKKKPLKHISKWKSIAECLSMKPDITIQHEKGISLQIPVFILKGNALADKLATQGSYVVNAGKRTADGSEFEKRTADGSEFESPKKKAKVE

SEQ ID NO: 7167 - protein, 2092 aa, synthetic construct
MPAAKRVKLDGGDKKYSIGLDIGTNSVGWAVITDEYKVPSKKFKVLGNTDRHSIKKNLIGALLFDSGETAEATRLKRTARRRYTRRKNRICYLQEIFSNEMAKVDDSFFHRLEESFLVEEDKKHERHPIFGNIVDEVAYHEKYPTIYHLRKKLVDSTDKADLRLIYLALAHMIKFRGHFLIEGDLNPDNSDVDKLFIQLVQTYNQLFEENPINASGVDAKAILSARLSKSRRLENLIAQLPGEKKNGLFGNLIALSLGLTPNFKSNFDLAEDAKLQLSKDTYDDDLDNLLAQIGDQYADLFLAAKNLSDAILLSDILRVNTEITKAPLSASMIKRYDEHHQDLTLLKALVRQQLPEKYKEIFFDQSKNGYAGYIDGGASQEEFYKFIKPILEKMDGTEELLVKLNREDLLRKQRTFDNGSIPHQIHLGELHAILRRQEDFYPFLKDNREKIEKILTFRIPYYVGPLARGNSRFAWMTRKSEETITPWNFEEVVDKGASAQSFIERMTNFDKNLPNEKVLPKHSLLYEYFTVYNELTKVKYVTEGMRKPAFLSGEQKKAIVDLLFKTNRKVTVKQLKEDYFKKIECFDSVEISGVEDRFNASLGTYHDLLKIIKDKDFLDNEENEDILEDIVLTLTLFEDREMIEERLKTYAHLFDDKVMKQLKRRRYTGWGRLSRKLINGIRDKQSGKTILDFLKSDGFANRNFMQLIHDDSLTFKEDIQKAQVSGQGDSLHEHIANLAGSPAIKKGILQTVKVVDELVKVMGRHKPENIVIEMARENQTTQKGQKNSRERMKRIEEGIKELGSQILKEHPVENTQLQNEKLYLYYLQNGRDMYVDQELDINRLSDYDVDHIVPQSFLKDDSIDNKVLTRSDKARGKSDNVPSEEVVKKMKNYWRQLLNAKLITQRKFDNLTKAERGGLSELDKAGFIKRQLVETRQITKHVAQILDSRMNTKYDENDKLIREVKVITLKSKLVSDFRKDFQFYKVREINNYHHAHDAYLNAVVGTALIKKYPKLESEFVYGDYKVYDVRKMIAKSEQEIGKATAKYFFYSNIMNFFKTEITLANGEIRKRPLIETNGETGEIVWDKGRDFATVRKVLSMPQVNIVKKTEVQTGGFSKESILPKRNSDKLIARKKDWDPKKYGGFDSPTVAYSVLVVAKVEKGKSKKLKSVKELLGITIMERSSFEKNPIDFLEAKGYKEVKKDLIIKLPKYSLFELENGRKRMLASAGELQKGNELALPSKYVNFLYLASHYEKLKGSPEDNEQKQLFVEQHKHYLDEIIEQISEFSKRVILADANLDKVLSAYNKHRDKPIREQAENIIHLFTLTNLGAPAAFKYFDTTIDRKRYTSTKEVLDATLIHQSITGLYETRIDLSQLGGDGGPAPGGSGSSGGVLNLEEEYRLHEKPVPSSIDPSWLQLFPTVWAERAGMGLANQVPPVVVELRSGASPVAVRQYPMSKEAREGIRPHIQKFLDLGVLVPCRSPWNTPLLPVKKPGTNDYRPVQDLREINKRVQDIHPTVPNPYNLLSSLPPSYTWYSVLDLKDAFFCLRLHPNSQPLFAFEWKDPEKGNTGQLTWTRLPQGFKNSPTLFNEALHRDLAPFRALNPQVVLLQYVDDLLVAAPTYEDCKKGTQKLLQELSKLGYRVSAKKAQLCQREVTYLGYLLKEGKRWLTPARKATVMKIPVPTTPRQVREFLGTAGFCRLWIPGFASLAAPLYPLTKPSIPFIWTEEHQQAFDHIKKALLSAPALALPDLTKPFTLYIDERAGVARGVLTQTLGPWRRPVAYLSKKLDPVASGWPTCLKAVAAVALLLKDADKLTLGQNVTVIASHSLESIVRQPPDRWMTNARMTHYQSLLLNERVSFAPPAVLNPATLLPVESEATPVHRCSEILAEETGTRRDLEDQPLPGVPTWYTDGSSFITEGKRRAGAPIVDGKRTVWASSLPEGTSAQKAELVALTQALRLAEGKNINIYTDSRYAFATAHIHGAIYKQRGWLTSAGKDIKNKEEILALLEAIHLPRRVAIIHCPGHQRGSNPVATGNRRADEAAKQAALSTRVLAGTTKPAGKRTADGSEFEKRTADGSEFESPKKKAKVE

SEQ ID NO: 7168 - protein, 2216 aa, synthetic construct
MPAAKRVKLDGGDKKYSIGLDIGTNSVGWAVITDEYKVPSKKFKVLGNTDRHSIKKNLIGALLFDSGETAEATRLKRTARRRYTRRKNRICYLQEIFSNEMAKVDDSFFHRLEESFLVEEDKKHERHPIFGNIVDEVAYHEKYPTIYHLRKKLVDSTDKADLRLIYLALAHMIKFRGHFLIEGDLNPDNSDVDKLFIQLVQTYNQLFEENPINASGVDAKAILSARLSKSRRLENLIAQLPGEKKNGLFGNLIALSLGLTPNFKSNFDLAEDAKLQLSKDTYDDDLDNLLAQIGDQYADLFLAAKNLSDAILLSDILRVNTEITKAPLSASMIKRYDEHHQDLTLLKALVRQQLPEKYKEIFFDQSKNGYAGYIDGGASQEEFYKFIKPILEKMDGTEELLVKLNREDLLRKQRTFDNGSIPHQIHLGELHAILRRQEDFYPFLKDNREKIEKILTFRIPYYVGPLARGNSRFAWMTRKSEETITPWNFEEVVDKGASAQSFIERMTNFDKNLPNEKVLPKHSLLYEYFTVYNELTKVKYVTEGMRKPAFLSGEQKKAIVDLLFKTNRKVTVKQLKEDYFKKIECFDSVEISGVEDRFNASLGTYHDLLKIIKDKDFLDNEENEDILEDIVLTLTLFEDREMIEERLKTYAHLFDDKVMKQLKRRRYTGWGRLSRKLINGIRDKQSGKTILDFLKSDGFANRNFMQLIHDDSLTFKEDIQKAQVSGQGDSLHEHIANLAGSPAIKKGILQTVKVVDELVKVMGRHKPENIVIEMARENQTTQKGQKNSRERMKRIEEGIKELGSQILKEHPVENTQLQNEKLYLYYLQNGRDMYVDQELDINRLSDYDVDHIVPQSFLKDDSIDNKVLTRSDKARGKSDNVPSEEVVKKMKNYWRQLLNAKLITQRKFDNLTKAERGGLSELDKAGFIKRQLVETRQITKHVAQILDSRMNTKYDENDKLIREVKVITLKSKLVSDFRKDFQFYKVREINNYHHAHDAYLNAVVGTALIKKYPKLESEFVYGDYKVYDVRKMIAKSEQEIGKATAKYFFYSNIMNFFKTEITLANGEIRKRPLIETNGETGEIVWDKGRDFATVRKVLSMPQVNIVKKTEVQTGGFSKESILPKRNSDKLIARKKDWDPKKYGGFDSPTVAYSVLVVAKVEKGKSKKLKSVKELLGITIMERSSFEKNPIDFLEAKGYKEVKKDLIIKLPKYSLFELENGRKRMLASAGELQKGNELALPSKYVNFLYLASHYEKLKGSPEDNEQKQLFVEQHKHYLDEIIEQISEFSKRVILADANLDKVLSAYNKHRDKPIREQAENIIHLFTLTNLGAPAAFKYFDTTIDRKRYTSTKEVLDATLIHQSITGLYETRIDLSQLGGDGGPAPGGSGSSGGTLGDQGSRGSDPLPEPRVTLTVEGIPTEFLVNTGAEHSVLTKPMGKMGSKRTVVAGATGSKVYPWTTKRLLKIGQKQVTHSFLVIPECPAPLLGRDLLTKLKAQIQFSTEGPQVTWEDRPAMCLVLNLEEEYRLHEKPVPPSIDPSWLQLFPMVWAEKAGMGLANQVPPVVVELKSDASPVAVRQYPMSKEAREGIRPHIQRFLDLGILVPCQSPWNTPLLPVKKPGTNDYRPVQDLREVNKRVQDIHPTVPNPYNLLSSLPPSHTWYSVLDLKDAFFCLKLHPNSQPLFAFEWRDPEKGNTGQLTWTRLPQGFKNSPTLFDEALHRDLASFRALNPQVVMLQYVDDLLVAAPTYRDCKEGTRRLLQELSKLGYRVSAKKAQLCREEVTYLGYLLKGGKRWLTPARKATVMKIPTPTTPRQVREFLGTAGFCRLWIPGFASLAAPLYPLTREKVPFTWTEAHQEAFGRIKEALLSAPALALPDLTKPFALYVDEKEGVARGVLTQTLGPWRRPVAYLSKKLDPVASGWPTCLKAIAAVALLLKDADKLTLGQNVLVIAPHNLESIVRQPPDRWMTNARMTHYQSLLLNERVSFAPPAILNPATLLPVESDDTPIHICSEILAEETGTRPDLRDQPLPGVPAWYTDGSSFIMDGRRQAGAAIVDNKRTVWASNLPEGTSAQKAELIALTQALRLAEGKSINIYTDSRYAFATAHVHGAIYKQRGLLTSAGKDIKNKEEILALLEAIHLPKRVAIIHCPGHQRGTDPVATGNRKADEAAKQAAQSTRILTETTKNAGKRTADGSEFEKRTADGSEFESPKKKAKVE

SEQ ID NO: 7169 - protein, 2094 aa, synthetic construct
MPAAKRVKLDGGDKKYSIGLDIGTNSVGWAVITDEYKVPSKKFKVLGNTDRHSIKKNLIGALLFDSGETAEATRLKRTARRRYTRRKNRICYLQEIFSNEMAKVDDSFFHRLEESFLVEEDKKHERHPIFGNIVDEVAYHEKYPTIYHLRKKLVDSTDKADLRLIYLALAHMIKFRGHFLIEGDLNPDNSDVDKLFIQLVQTYNQLFEENPINASGVDAKAILSARLSKSRRLENLIAQLPGEKKNGLFGNLIALSLGLTPNFKSNFDLAEDAKLQLSKDTYDDDLDNLLAQIGDQYADLFLAAKNLSDAILLSDILRVNTEITKAPLSASMIKRYDEHHQDLTLLKALVRQQLPEKYKEIFFDQSKNGYAGYIDGGASQEEFYKFIKPILEKMDGTEELLVKLNREDLLRKQRTFDNGSIPHQIHLGELHAILRRQEDFYPFLKDNREKIEKILTFRIPYYVGPLARGNSRFAWMTRKSEETITPWNFEEVVDKGASAQSFIERMTNFDKNLPNEKVLPKHSLLYEYFTVYNELTKVKYVTEGMRKPAFLSGEQKKAIVDLLFKTNRKVTVKQLKEDYFKKIECFDSVEISGVEDRFNASLGTYHDLLKIIKDKDFLDNEENEDILEDIVLTLTLFEDREMIEERLKTYAHLFDDKVMKQLKRRRYTGWGRLSRKLINGIRDKQSGKTILDFLKSDGFANRNFMQLIHDDSLTFKEDIQKAQVSGQGDSLHEHIANLAGSPAIKKGILQTVKVVDELVKVMGRHKPENIVIEMARENQTTQKGQKNSRERMKRIEEGIKELGSQILKEHPVENTQLQNEKLYLYYLQNGRDMYVDQELDINRLSDYDVDHIVPQSFLKDDSIDNKVLTRSDKARGKSDNVPSEEVVKKMKNYWRQLLNAKLITQRKFDNLTKAERGGLSELDKAGFIKRQLVETRQITKHVAQILDSRMNTKYDENDKLIREVKVITLKSKLVSDFRKDFQFYKVREINNYHHAHDAYLNAVVGTALIKKYPKLESEFVYGDYKVYDVRKMIAKSEQEIGKATAKYFFYSNIMNFFKTEITLANGEIRKRPLIETNGETGEIVWDKGRDFATVRKVLSMPQVNIVKKTEVQTGGFSKESILPKRNSDKLIARKKDWDPKKYGGFDSPTVAYSVLVVAKVEKGKSKKLKSVKELLGITIMERSSFEKNPIDFLEAKGYKEVKKDLIIKLPKYSLFELENGRKRMLASAGELQKGNELALPSKYVNFLYLASHYEKLKGSPEDNEQKQLFVEQHKHYLDEIIEQISEFSKRVILADANLDKVLSAYNKHRDKPIREQAENIIHLFTLTNLGAPAAFKYFDTTIDRKRYTSTKEVLDATLIHQSITGLYETRIDLSQLGGDGGPAPGGSGSSGGLGIEDEYRLHETSTEPDVSLGSTWLSDFPQAWAETGGMGLAVRQAPLIIPLKATSTPVSIQQYPMSHEARLGIKPHIQRLLDQGILVPCQSPWNTPLLPVKKPGTNDYRPVQDLREVNKRVEDIHPTVPNPYNLLSGLPPSHQWYTVLDLKDAFFCLRLHPTSQPLFAFEWRDPGMGISGQLTWTRLPQGFKNSPTLFNEALHRDLADFRIQHPDLILLQYVDDILLAATSELDCQQGTRALLQTLGDLGYRASAKKAQICQKQVKYLGYLLREGQRWLTEARKETVMGQPVPKTPRQLREFLGKAGFCRLFIPGFAEMAAPLYPLTKPGTLFSWGPDQQKAYQEIKQALLTAPALGLPDLTKPFELFVDEKQGYAKGVLTQKLGPWRRPVAYLSKKLDPVAAGWPPCLRMVAAIAVLTKDAGKLTMGQPLVILAPHAVEALVKQPPDRWLSNARMTHYQAMLLDTDRVQFGPVVALNPATLLPLPEEGAPHDCLEILAETHGTRPDLTDQPIPDADHTWYTDGSSFLQEGQRKAGAAVTTETEVIWAGALPAGTSAQRAELIALTQALKMAEGKRLNVYTDSRYAFATAHIHGEIYRRRGWLTSEGREIKNKSEILALLKALFLPKRLSIIHCLGHQKGDSAEARGNRLADQAAREAAIKTPPDTSTLLIAGKRTADGSEFEKRTADGSEFESPKKKAKVE

SEQ ID NO: 7170 - protein, 2094 aa, synthetic construct
MPAAKRVKLDGGDKKYSIGLDIGTNSVGWAVITDEYKVPSKKFKVLGNTDRHSIKKNLIGALLFDSGETAEATRLKRTARRRYTRRKNRICYLQEIFSNEMAKVDDSFFHRLEESFLVEEDKKHERHPIFGNIVDEVAYHEKYPTIYHLRKKLVDSTDKADLRLIYLALAHMIKFRGHFLIEGDLNPDNSDVDKLFIQLVQTYNQLFEENPINASGVDAKAILSARLSKSRRLENLIAQLPGEKKNGLFGNLIALSLGLTPNFKSNFDLAEDAKLQLSKDTYDDDLDNLLAQIGDQYADLFLAAKNLSDAILLSDILRVNTEITKAPLSASMIKRYDEHHQDLTLLKALVRQQLPEKYKEIFFDQSKNGYAGYIDGGASQEEFYKFIKPILEKMDGTEELLVKLNREDLLRKQRTFDNGSIPHQIHLGELHAILRRQEDFYPFLKDNREKIEKILTFRIPYYVGPLARGNSRFAWMTRKSEETITPWNFEEVVDKGASAQSFIERMTNFDKNLPNEKVLPKHSLLYEYFTVYNELTKVKYVTEGMRKPAFLSGEQKKAIVDLLFKTNRKVTVKQLKEDYFKKIECFDSVEISGVEDRFNASLGTYHDLLKIIKDKDFLDNEENEDILEDIVLTLTLFEDREMIEERLKTYAHLFDDKVMKQLKRRRYTGWGRLSRKLINGIRDKQSGKTILDFLKSDGFANRNFMQLIHDDSLTFKEDIQKAQVSGQGDSLHEHIANLAGSPAIKKGILQTVKVVDELVKVMGRHKPENIVIEMARENQTTQKGQKNSRERMKRIEEGIKELGSQILKEHPVENTQLQNEKLYLYYLQNGRDMYVDQELDINRLSDYDVDHIVPQSFLKDDSIDNKVLTRSDKARGKSDNVPSEEVVKKMKNYWRQLLNAKLITQRKFDNLTKAERGGLSELDKAGFIKRQLVETRQITKHVAQILDSRMNTKYDENDKLIREVKVITLKSKLVSDFRKDFQFYKVREINNYHHAHDAYLNAVVGTALIKKYPKLESEFVYGDYKVYDVRKMIAKSEQEIGKATAKYFFYSNIMNFFKTEITLANGEIRKRPLIETNGETGEIVWDKGRDFATVRKVLSMPQVNIVKKTEVQTGGFSKESILPKRNSDKLIARKKDWDPKKYGGFDSPTVAYSVLVVAKVEKGKSKKLKSVKELLGITIMERSSFEKNPIDFLEAKGYKEVKKDLIIKLPKYSLFELENGRKRMLASAGELQKGNELALPSKYVNFLYLASHYEKLKGSPEDNEQKQLFVEQHKHYLDEIIEQISEFSKRVILADANLDKVLSAYNKHRDKPIREQAENIIHLFTLTNLGAPAAFKYFDTTIDRKRYTSTKEVLDATLIHQSITGLYETRIDLSQLGGDGGPAPGGSGSSGGTLGIEDEYRLHETSTEPDVSLGSTWLSDFPQAWAETGGMGLAVRQAPLIIPLKATSTPVSIQQYPMSHEARLGIKPHIQRLLDQGILVPCQSPWNTPLLPVKKPGTNDYRPVQDLREVNKRVEDIHPTVPNPYNLLSGLPPSHQWYTVLDLKDAFFCLRLHPTSQPLFAFEWRDPGMGISGQLTWTRLPQGFKNSPTLFNEALHRDLADFRIQHPDLILLQYVDDILLAATSELDCQQGTRALLQTLGDLGYRASAKKAQICQKQVKYLGYLLREGQRWLTEARKETVMGQPVPKTPRQLREFLGTAGFCRLWIPGFAEMAAPLYPLTKPGTLFSWGPDQQKAYQEIKQALLTAPALGLPDLTKPFELFVDEKQGYAKGVLTQKLGPWRRPVAYLSKKLDPVAAGWPPCLRMVAAIAVLTKDAGKLTMGQPLVILAPHAVEALVKQPPDRWLSNARMTHYQAMLLDTDRVQFGPVVALNPATLLPLPEEGAPHDCLEILAETHGTRPDLTDQPIPDADHTWYTDGSSFLQEGQRKAGAAVTTETEVIWAGALPAGTSAQRAELIALTQALKMAEGKRLNVYTDSRYAFATAHIHGEIYRRRGWLTSEGREIKNKSEILALLKALFLPKRLSIIHCLGHQKGDSAEARGNRLADQAAREAAIKTPPDTSTLLAGKRTADGSEFEKRTADGSEFESPKKKAKVE

SEQ ID NO: 7171 - protein, 2094 aa, synthetic construct
MPAAKRVKLDGGDKKYSIGLDIGTNSVGWAVITDEYKVPSKKFKVLGNTDRHSIKKNLIGALLFDSGETAEATRLKRTARRRYTRRKNRICYLQEIFSNEMAKVDDSFFHRLEESFLVEEDKKHERHPIFGNIVDEVAYHEKYPTIYHLRKKLVDSTDKADLRLIYLALAHMIKFRGHFLIEGDLNPDNSDVDKLFIQLVQTYNQLFEENPINASGVDAKAILSARLSKSRRLENLIAQLPGEKKNGLFGNLIALSLGLTPNFKSNFDLAEDAKLQLSKDTYDDDLDNLLAQIGDQYADLFLAAKNLSDAILLSDILRVNTEITKAPLSASMIKRYDEHHQDLTLLKALVRQQLPEKYKEIFFDQSKNGYAGYIDGGASQEEFYKFIKPILEKMDGTEELLVKLNREDLLRKQRTFDNGSIPHQIHLGELHAILRRQEDFYPFLKDNREKIEKILTFRIPYYVGPLARGNSRFAWMTRKSEETITPWNFEEVVDKGASAQSFIERMTNFDKNLPNEKVLPKHSLLYEYFTVYNELTKVKYVTEGMRKPAFLSGEQKKAIVDLLFKTNRKVTVKQLKEDYFKKIECFDSVEISGVEDRFNASLGTYHDLLKIIKDKDFLDNEENEDILEDIVLTLTLFEDREMIEERLKTYAHLFDDKVMKQLKRRRYTGWGRLSRKLINGIRDKQSGKTILDFLKSDGFANRNFMQLIHDDSLTFKEDIQKAQVSGQGDSLHEHIANLAGSPAIKKGILQTVKVVDELVKVMGRHKPENIVIEMARENQTTQKGQKNSRERMKRIEEGIKELGSQILKEHPVENTQLQNEKLYLYYLQNGRDMYVDQELDINRLSDYDVDHIVPQSFLKDDSIDNKVLTRSDKARGKSDNVPSEEVVKKMKNYWRQLLNAKLITQRKFDNLTKAERGGLSELDKAGFIKRQLVETRQITKHVAQILDSRMNTKYDENDKLIREVKVITLKSKLVSDFRKDFQFYKVREINNYHHAHDAYLNAVVGTALIKKYPKLESEFVYGDYKVYDVRKMIAKSEQEIGKATAKYFFYSNIMNFFKTEITLANGEIRKRPLIETNGETGEIVWDKGRDFATVRKVLSMPQVNIVKKTEVQTGGFSKESILPKRNSDKLIARKKDWDPKKYGGFDSPTVAYSVLVVAKVEKGKSKKLKSVKELLGITIMERSSFEKNPIDFLEAKGYKEVKKDLIIKLPKYSLFELENGRKRMLASAGELQKGNELALPSKYVNFLYLASHYEKLKGSPEDNEQKQLFVEQHKHYLDEIIEQISEFSKRVILADANLDKVLSAYNKHRDKPIREQAENIIHLFTLTNLGAPAAFKYFDTTIDRKRYTSTKEVLDATLIHQSITGLYETRIDLSQLGGDGGPAPGGSGSSGGTLNIEDEYRLHETSKEPDVSLGSTWLSDFPQAWAETGGMGLAVRQAPLIIPLKATSTPVSIKQYPMSQEARLGIKPHIQRLLDQGILVPCQSPWNTPLLPVKKPGTNDYRPVQDLREVNKRVEDIHPTVPNPYNLLSGLPPSHQWYTVLDLKDAFFCLRLHPTSQPLFAFEWRDPEMGISGQLTWTRLPQGFKNSPTLFNEALHRDLAGFRIQHPDLILLQYVDDLLLAATSELDCQQGTRALLQTLGDLGYRASAKKAQICQKQVKYLGYLLKEGQRWLTEARKETVMGQPIPKTPRQLREFLGTAGFCRLWIPGFAEMAAPLYPLTKPGTLFNWGPDQQKAFQEIKQALLTAPALGLPDLTKPFELFVDEKQGYAKGVLTQKLGPWRRPVAYLSKKLDPVAAGWPPCLRMVAAIAVLTKDAGKLTMGQPLVILAPHAVEALVKQPPDRWLSNARMTHYQALLLDTDRVQFGPVVALNPATLLPLPEEGLQHDCLDILAEAHGTRSDLMDQPLPDADHTWYTDGSSFLQEGQRKAGAAVTTETEVIWARALPAGTSAQRAELIALTQALKMAEGKKLNVYTDSRYAFATAHIHGEIYRRRGWLTSEGKEIKNKDEILALLKALFLPKRLSIIHCPGHQKGNSAEARGNRMADQAAREVATRETPETSTLLAGKRTADGSEFEKRTADGSEFESPKKKAKVE

SEQ ID NO: 7172 - protein, 2114 aa, synthetic construct
MPAAKRVKLDGGDKKYSIGLDIGTNSVGWAVITDEYKVPSKKFKVLGNTDRHSIKKNLIGALLFDSGETAEATRLKRTARRRYTRRKNRICYLQEIFSNEMAKVDDSFFHRLEESFLVEEDKKHERHPIFGNIVDEVAYHEKYPTIYHLRKKLVDSTDKADLRLIYLALAHMIKFRGHFLIEGDLNPDNSDVDKLFIQLVQTYNQLFEENPINASGVDAKAILSARLSKSRRLENLIAQLPGEKKNGLFGNLIALSLGLTPNFKSNFDLAEDAKLQLSKDTYDDDLDNLLAQIGDQYADLFLAAKNLSDAILLSDILRVNTEITKAPLSASMIKRYDEHHQDLTLLKALVRQQLPEKYKEIFFDQSKNGYAGYIDGGASQEEFYKFIKPILEKMDGTEELLVKLNREDLLRKQRTFDNGSIPHQIHLGELHAILRRQEDFYPFLKDNREKIEKILTFRIPYYVGPLARGNSRFAWMTRKSEETITPWNFEEVVDKGASAQSFIERMTNFDKNLPNEKVLPKHSLLYEYFTVYNELTKVKYVTEGMRKPAFLSGEQKKAIVDLLFKTNRKVTVKQLKEDYFKKIECFDSVEISGVEDRFNASLGTYHDLLKIIKDKDFLDNEENEDILEDIVLTLTLFEDREMIEERLKTYAHLFDDKVMKQLKRRRYTGWGRLSRKLINGIRDKQSGKTILDFLKSDGFANRNFMQLIHDDSLTFKEDIQKAQVSGQGDSLHEHIANLAGSPAIKKGILQTVKVVDELVKVMGRHKPENIVIEMARENQTTQKGQKNSRERMKRIEEGIKELGSQILKEHPVENTQLQNEKLYLYYLQNGRDMYVDQELDINRLSDYDVDHIVPQSFLKDDSIDNKVLTRSDKARGKSDNVPSEEVVKKMKNYWRQLLNAKLITQRKFDNLTKAERGGLSELDKAGFIKRQLVETRQITKHVAQILDSRMNTKYDENDKLIREVKVITLKSKLVSDFRKDFQFYKVREINNYHHAHDAYLNAVVGTALIKKYPKLESEFVYGDYKVYDVRKMIAKSEQEIGKATAKYFFYSNIMNFFKTEITLANGEIRKRPLIETNGETGEIVWDKGRDFATVRKVLSMPQVNIVKKTEVQTGGFSKESILPKRNSDKLIARKKDWDPKKYGGFDSPTVAYSVLVVAKVEKGKSKKLKSVKELLGITIMERSSFEKNPIDFLEAKGYKEVKKDLIIKLPKYSLFELENGRKRMLASAGELQKGNELALPSKYVNFLYLASHYEKLKGSPEDNEQKQLFVEQHKHYLDEIIEQISEFSKRVILADANLDKVLSAYNKHRDKPIREQAENIIHLFTLTNLGAPAAFKYFDTTIDRKRYTSTKEVLDATLIHQSITGLYETRIDLSQLGGDGGPAPGGSGSSGGTLNIEDEYRLHETSKEPDVSLGSTWLSDFPQAWAETGGMGLAVRQAPLIIPLKATSTPVSIKQYPMSQEARLGIKPHIQRLLDQGILVPCQSPWNTPLLPVKKPGTNDYRPVQDLREVNKRVEDIHPTVPNPYNLLSGLPPSHQWYTVLDLKDAFFCLRLHPTSQPLFAFEWRDPEMGISGQLTWTRLPQGFKNSPTLFNEALHRDLADFRIQHPDLILLQYVDDLLLAATSELDCQQGTRALLQTLGNLGYRASAKKAQICQKQVKYLGYLLKEGQRWLTEARKETVMGQPTPKTPRQLREFLGKAGFCRLFIPGFAEMAAPLYPLTKPGTLFNWGPDQQKAYQEIKQALLTAPALGLPDLTKPFELFVDEKQGYAKGVLTQKLGPWRRPVAYLSKKLDPVAAGWPPCLRMVAAIAVLTKDAGKLTMGQPLVILAPHAVEALVKQPPDRWLSNARMTHYQALLLDTDRVQFGPVVALNPATLLPLPEEGLQHNCLDILAEAHGTRPDLTDQPLPDADHTWYTDGSSLLQEGQRKAGAAVTTETEVIWAKALPAGTSAQRAELIALTQALKMAEGKKLNVYTDSRYAFATAHIHGEIYRRRGWLTSEGKEIKNKDEILALLKALFLPKRLSIIHCPGHQKGHSAEARGNRMADQAARKAAITETPDTSTLLIENSSPSGGSKRTADGSEFEAGKRTADGSEFEKRTADGSEFESPKKKAKVE

SEQ ID NO: 7173 - protein, 2094 aa, synthetic construct
MPAAKRVKLDGGDKKYSIGLDIGTNSVGWAVITDEYKVPSKKFKVLGNTDRHSIKKNLIGALLFDSGETAEATRLKRTARRRYTRRKNRICYLQEIFSNEMAKVDDSFFHRLEESFLVEEDKKHERHPIFGNIVDEVAYHEKYPTIYHLRKKLVDSTDKADLRLIYLALAHMIKFRGHFLIEGDLNPDNSDVDKLFIQLVQTYNQLFEENPINASGVDAKAILSARLSKSRRLENLIAQLPGEKKNGLFGNLIALSLGLTPNFKSNFDLAEDAKLQLSKDTYDDDLDNLLAQIGDQYADLFLAAKNLSDAILLSDILRVNTEITKAPLSASMIKRYDEHHQDLTLLKALVRQQLPEKYKEIFFDQSKNGYAGYIDGGASQEEFYKFIKPILEKMDGTEELLVKLNREDLLRKQRTFDNGSIPHQIHLGELHAILRRQEDFYPFLKDNREKIEKILTFRIPYYVGPLARGNSRFAWMTRKSEETITPWNFEEVVDKGASAQSFIERMTNFDKNLPNEKVLPKHSLLYEYFTVYNELTKVKYVTEGMRKPAFLSGEQKKAIVDLLFKTNRKVTVKQLKEDYFKKIECFDSVEISGVEDRFNASLGTYHDLLKIIKDKDFLDNEENEDILEDIVLTLTLFEDREMIEERLKTYAHLFDDKVMKQLKRRRYTGWGRLSRKLINGIRDKQSGKTILDFLKSDGFANRNFMQLIHDDSLTFKEDIQKAQVSGQGDSLHEHIANLAGSPAIKKGILQTVKVVDELVKVMGRHKPENIVIEMARENQTTQKGQKNSRERMKRIEEGIKELGSQILKEHPVENTQLQNEKLYLYYLQNGRDMYVDQELDINRLSDYDVDHIVPQSFLKDDSIDNKVLTRSDKARGKSDNVPSEEVVKKMKNYWRQLLNAKLITQRKFDNLTKAERGGLSELDKAGFIKRQLVETRQITKHVAQILDSRMNTKYDENDKLIREVKVITLKSKLVSDFRKDFQFYKVREINNYHHAHDAYLNAVVGTALIKKYPKLESEFVYGDYKVYDVRKMIAKSEQEIGKATAKYFFYSNIMNFFKTEITLANGEIRKRPLIETNGETGEIVWDKGRDFATVRKVLSMPQVNIVKKTEVQTGGFSKESILPKRNSDKLIARKKDWDPKKYGGFDSPTVAYSVLVVAKVEKGKSKKLKSVKELLGITIMERSSFEKNPIDFLEAKGYKEVKKDLIIKLPKYSLFELENGRKRMLASAGELQKGNELALPSKYVNFLYLASHYEKLKGSPEDNEQKQLFVEQHKHYLDEIIEQISEFSKRVILADANLDKVLSAYNKHRDKPIREQAENIIHLFTLTNLGAPAAFKYFDTTIDRKRYTSTKEVLDATLIHQSITGLYETRIDLSQLGGDGGPAPGGSGSSGGTLNIEDEHRLHETSKEPDVSLGSTWLSDFPQAWAETGGMGLAVRQAPLIIPLKATSTPVSIKQYPMSQEARLGIKPHIQRLLDQGILVPCQSPWNTPLLPVKKPGTNDYRPVQDLREVNKRVEDIHPTVPNPYNLLSGLPPSHQWYTVLDLKDAFFCLRLHPTSQPLFAFEWRDPEMGISGQLTWTRLPQGFKNSPTLFNEALHRDLADFRIQHPDLILLQYVDDLLLAATSELDCQQGTRALLQTLGNLGYRASAKKAQICQKQVKYLGYLLKEGQRWLTEARKETVMGQPTPKTPRQLREFLGTAGFCRLWIPGFAEMAAPLYPLTKPGTLFNWGPDQQKAYQEIKQALLTAPALGLPDLTKPFELFVDEKQGYAKGVLTQKLGPWRRPVAYLSKKLDPVAAGWPPCLRMVAAIAVLTKDAGKLTMGQPLVILAPHAVEALVKQPPDRWLSNARMTHYQALLLDTDRVQFGPVVALNPATLLPLPEEGLQHNCLDILAEAHGTRPDLTDQPLPDADHTWYTDGSSLLQEGQRKAGAAVTTETEVIWAKALPAGTSAQRAELIALTQALKMAEGKKLNVYTDSRYAFATAHIHGEIYRRRGWLTSEGKEIKNKDEILALLKALFLPKRLSIIHCPGHQKGHSAEARGNRMADQAARKAAITETPDTSTLLAGKRTADGSEFEKRTADGSEFESPKKKAKVE

SEQ ID NO: 7174 - protein, 2114 aa, synthetic construct; identical to SEQ ID NO: 7172

SEQ ID NO: 7175 - protein, 2094 aa, synthetic construct
MPAAKRVKLDGGDKKYSIGLDIGTNSVGWAVITDEYKVPSKKFKVLGNTDRHSIKKNLIGALLFDSGETAEATRLKRTARRRYTRRKNRICYLQEIFSNEMAKVDDSFFHRLEESFLVEEDKKHERHPIFGNIVDEVAYHEKYPTIYHLRKKLVDSTDKADLRLIYLALAHMIKFRGHFLIEGDLNPDNSDVDKLFIQLVQTYNQLFEENPINASGVDAKAILSARLSKSRRLENLIAQLPGEKKNGLFGNLIALSLGLTPNFKSNFDLAEDAKLQLSKDTYDDDLDNLLAQIGDQYADLFLAAKNLSDAILLSDILRVNTEITKAPLSASMIKRYDEHHQDLTLLKALVRQQLPEKYKEIFFDQSKNGYAGYIDGGASQEEFYKFIKPILEKMDGTEELLVKLNREDLLRKQRTFDNGSIPHQIHLGELHAILRRQEDFYPFLKDNREKIEKILTFRIPYYVGPLARGNSRFAWMTRKSEETITPWNFEEVVDKGASAQSFIERMTNFDKNLPNEKVLPKHSLLYEYFTVYNELTKVKYVTEGMRKPAFLSGEQKKAIVDLLFKTNRKVTVKQLKEDYFKKIECFDSVEISGVEDRFNASLGTYHDLLKIIKDKDFLDNEENEDILEDIVLTLTLFEDREMIEERLKTYAHLFDDKVMKQLKRRRYTGWGRLSRKLINGIRDKQSGKTILDFLKSDGFANRNFMQLIHDDSLTFKEDIQKAQVSGQGDSLHEHIANLAGSPAIKKGILQTVKVVDELVKVMGRHKPENIVIEMARENQTTQKGQKNSRERMKRIEEGIKELGSQILKEHPVENTQLQNEKLYLYYLQNGRDMYVDQELDINRLSDYDVDHIVPQSFLKDDSIDNKVLTRSDKARGKSDNVPSEEVVKKMKNYWRQLLNAKLITQRKFDNLTKAERGGLSELDKAGFIKRQLVETRQITKHVAQILDSRMNTKYDENDKLIREVKVITLKSKLVSDFRKDFQFYKVREINNYHHAHDAYLNAVVGTALIKKYPKLESEFVYGDYKVYDVRKMIAKSEQEIGKATAKYFFYSNIMNFFKTEITLANGEIRKRPLIETNGETGEIVWDKGRDFATVRKVLSMPQVNIVKKTEVQTGGFSKESILPKRNSDKLIARKKDWDPKKYGGFDSPTVAYSVLVVAKVEKGKSKKLKSVKELLGITIMERSSFEKNPIDFLEAKGYKEVKKDLIIKLPKYSLFELENGRKRMLASAGELQKGNELALPSKYVNFLYLASHYEKLKGSPEDNEQKQLFVEQHKHYLDEIIEQISEFSKRVILADANLDKVLSAYNKHRDKPIREQAENIIHLFTLTNLGAPAAFKYFDTTIDRKRYTSTKEVLDATLIHQSITGLYETRIDLSQLGGDGGPAPGGSGSSGGTLNIEDEHRLHETSKEPDVSLGSTWLSDFPQAWAETGGMGLAVRQAPLIIPLKATSTPVSIKQYPMSQEARLGIKPHIQRLLDQGILVPCQSPWNTPLLPVKKPGTNDYRPVQDLREVNKRVEDIHPTVPNPYNLLSGLPPSHQWYTVLDLKDAFFCLRLHPTSQPLFAFEWRDPEMGISGQLTWTRLPQGFKNSPTLFDEALHRDLADFRIQHPDLILLQYVDDLLLAATSELDCQQGTRALLQTLGNLGYRASAKKAQICQKQVKYLGYLLKEGQRWLTEARKETVMGQPTPKTPRQLREFLGTAGFCRLWIPGFAEMAAPLYPLTKTGTLFNWGPDQQKAYQEIKQALLTAPALGLPDLTKPFELFVDEKQGYAKGVLTQKLGPWRRPVAYLSKKLDPVAAGWPPCLRMVAAIAVLTKDAGKLTMGQPLVILAPHAVEALVKQPPDRWLSNARMTHYQALLLDTDRVQFGPVVALNPATLLPLPEEGLQHNCLDILAEAHGTRPDLTDQPLPDADHTWYTDGSSLLQEGQRKAGAAVTTETEVIWAKALPAGTSAQRAELIALTQALKMAEGKKLNVYTDSRYAFATAHIHGEIYRRRGLLTSEGKEIKNKDEILALLKALFLPKRLSIIHCPGHQKGHSAEARGNRMADQAARKAAITETPDTSTLLAGKRTADGSEFEKRTADGSEFESPKKKAKVE

SEQ ID NO: 7176 - protein, 2094 aa, synthetic construct; identical to SEQ ID NO: 7173

SEQ ID NO: 7177 - protein, 2085 aa, synthetic construct
MPAAKRVKLDGGDKKYSIGLDIGTNSVGWAVITDEYKVPSKKFKVLGNTDRHSIKKNLIGALLFDSGETAEATRLKRTARRRYTRRKNRICYLQEIFSNEMAKVDDSFFHRLEESFLVEEDKKHERHPIFGNIVDEVAYHEKYPTIYHLRKKLVDSTDKADLRLIYLALAHMIKFRGHFLIEGDLNPDNSDVDKLFIQLVQTYNQLFEENPINASGVDAKAILSARLSKSRRLENLIAQLPGEKKNGLFGNLIALSLGLTPNFKSNFDLAEDAKLQLSKDTYDDDLDNLLAQIGDQYADLFLAAKNLSDAILLSDILRVNTEITKAPLSASMIKRYDEHHQDLTLLKALVRQQLPEKYKEIFFDQSKNGYAGYIDGGASQEEFYKFIKPILEKMDGTEELLVKLNREDLLRKQRTFDNGSIPHQIHLGELHAILRRQEDFYPFLKDNREKIEKILTFRIPYYVGPLARGNSRFAWMTRKSEETITPWNFEEVVDKGASAQSFIERMTNFDKNLPNEKVLPKHSLLYEYFTVYNELTKVKYVTEGMRKPAFLSGEQKKAIVDLLFKTNRKVTVKQLKEDYFKKIECFDSVEISGVEDRFNASLGTYHDLLKIIKDKDFLDNEENEDILEDIVLTLTLFEDREMIEERLKTYAHLFDDKVMKQLKRRRYTGWGRLSRKLINGIRDKQSGKTILDFLKSDGFANRNFMQLIHDDSLTFKEDIQKAQVSGQGDSLHEHIANLAGSPAIKKGILQTVKVVDELVKVMGRHKPENIVIEMARENQTTQKGQKNSRERMKRIEEGIKELGSQILKEHPVENTQLQNEKLYLYYLQNGRDMYVDQELDINRLSDYDVDHIVPQSFLKDDSIDNKVLTRSDKARGKSDNVPSEEVVKKMKNYWRQLLNAKLITQRKFDNLTKAERGGLSELDKAGFIKRQLVETRQITKHVAQILDSRMNTKYDENDKLIREVKVITLKSKLVSDFRKDFQFYKVREINNYHHAHDAYLNAVVGTALIKKYPKLESEFVYGDYKVYDVRKMIAKSEQEIGKATAKYFFYSNIMNFFKTEITLANGEIRKRPLIETNGETGEIVWDKGRDFATVRKVLSMPQVNIVKKTEVQTGGFSKESILPKRNSDKLIARKKDWDPKKYGGFDSPTVAYSVLVVAKVEKGKSKKLKSVKELLGITIMERSSFEKNPIDFLEAKGYKEVKKDLIIKLPKYSLFELENGRKRMLASAGELQKGNELALPSKYVNFLYLASHYEKLKGSPEDNEQKQLFVEQHKHYLDEIIEQISEFSKRVILADANLDKVLSAYNKHRDKPIREQAENIIHLFTLTNLGAPAAFKYFDTTIDRKRYTSTKEVLDATLIHQSITGLYETRIDLSQLGGDGGPAPGGSGSSGGIPWLMKKPLQLTTLVPLQEYEERLLKQTMLTGSYKEKLQSLFLKYDALWQHWENQVGHRRIKPHHIATGTVNPRPQKQYPINPKAKASIQTVINDLLKQGVLIQQNSIMNTPVYPVPKPDGKWRMVLDYREVNKTIPLIAAQNQHSAGILSSIFRGKYKTTLDLSNGFWAHSITPESYWLTAFTWLGQQYCWTRLPQGFLNSPALFNADVVDLLKEVPNVQVYVDDIYISHDDPREHLEQLEKVFSLLLNAGYVVSLKKSEIAQHEVEFLGFNITKEGRGLTETFKQKLLNITPPRDLKQLQSILGKLNFARNFIPNFSELVKPLYNIIATAPGKYITWTTDNSQQLQNIISMLNSAENLEERNPEVRLIMKVNTSPSAGYIRFYNEFAKRPIMYLNYVYTKAEVKFTNTEKLLTTIHKGLIKALDLGMGQEILVYSPIVSMTKIQKTPLPERKALPIRWITWMSYLEDPRIQFHYDKTLPELQQVPTVTDDIIAKIKHPSEFSMVFYTDGSAIKHPNVNKSHNAGMGIAQVQFKPEFTVINTWSIPLGDHTAQLAEVAAVEFACKKALKIDGPVLIVTDSFYVAESVNKELPYWQSNGFFNNKKKPLKHVSKWKSIADCIQLKPDIIIIHEKGHQPTASTFHTEGNNLADKLATQGSYVVNAGKRTADGSEFEKRTADGSEFESPKKKAKVE

SEQ ID NO: 7178 - protein, 2092 aa, synthetic construct
MPAAKRVKLDGGDKKYSIGLDIGTNSVGWAVITDEYKVPSKKFKVLGNTDRHSIKKNLIGALLFDSGETAEATRLKRTARRRYTRRKNRICYLQEIFSNEMAKVDDSFFHRLEESFLVEEDKKHERHPIFGNIVDEVAYHEKYPTIYHLRKKLVDSTDKADLRLIYLALAHMIKFRGHFLIEGDLNPDNSDVDKLFIQLVQTYNQLFEENPINASGVDAKAILSARLSKSRRLENLIAQLPGEKKNGLFGNLIALSLGLTPNFKSNFDLAEDAKLQLSKDTYDDDLDNLLAQIGDQYADLFLAAKNLSDAILLSDILRVNTEITKAPLSASMIKRYDEHHQDLTLLKALVRQQLPEKYKEIFFDQSKNGYAGYIDGGASQEEFYKFIKPILEKMDGTEELLVKLNREDLLRKQRTFDNGSIPHQIHLGELHAILRRQEDFYPFLKDNREKIEKILTFRIPYYVGPLARGNSRFAWMTRKSEETITPWNFEEVVDKGASAQSFIERMTNFDKNLPNEKVLPKHSLLYEYFTVYNELTKVKYVTEGMRKPAFLSGEQKKAIVDLLFKTNRKVTVKQLKEDYFKKIECFDSVEISGVEDRFNASLGTYHDLLKIIKDKDFLDNEENEDILEDIVLTLTLFEDREMIEERLKTYAHLFDDKVMKQLKRRRYTGWGRLSRKLINGIRDKQSGKTILDFLKSDGFANRNFMQLIHDDSLTFKEDIQKAQVSGQGDSLHEHIANLAGSPAIKKGILQTVKVVDELVKVMGRHKPENIVIEMARENQTTQKGQKNSRERMKRIEEGIKELGSQILKEHPVENTQLQNEKLYLYYLQNGRDMYVDQELDINRLSDYDVDHIVPQSFLKDDSIDNKVLTRSDKARGKSDNVPSEEVVKKMKNYWRQLLNAKLITQRKFDNLTKAERGGLSELDKAGFIKRQLVETRQITKHVAQILDSRMNTKYDENDKLIREVKVITLKSKLVSDFRKDFQFYKVREINNYHHAHDAYLNAVVGTALIKKYPKLESEFVYGDYKVYDVRKMIAKSEQEIGKATAKYFFYSNIMNFFKTEITLANGEIRKRPLIETNGETGEIVWDKGRDFATVRKVLSMPQVNIVKKTEVQTGGFSKESILPKRNSDKLIARKKDWDPKKYGGFDSPTVAYSVLVVAKVEKGKSKKLKSVKELLGITIMERSSFEKNPIDFLEAKGYKEVKKDLIIKLPKYSLFELENGRKRMLASAGELQKGNELALPSKYVNFLYLASHYEKLKGSPEDNEQKQLFVEQHKHYLDEIIEQISEFSKRVILADANLDKVLSAYNKHRDKPIREQAENIIHLFTLTNLGAPAAFKYFDTTIDRKRYTSTKEVLDATLIHQSITGLYETRIDLSQLGGDGGPAPGGSGSSGGVLNLEEEYRLHEKPVPSSIDPSWLQLFPTVWAERAGMGLANQVPPVVVELRSGASPVAVRQYPMSKEAREGIRPHIQRFLDLGVLVPCQSPWNTPLLPVKKPGTNDYRPVQDLREINKRVQDIHPTVPNPYNLLSSLPPSHTWYSVLDLKDAFFCLKLHPNSQPLFAFEWRDPEKGNTGQLTWTRLPQGFKNSPTLFNEALHRDLAPFRALNPQVVLLQYVDDLLVAAPTYRDCKEGTQKLLQELSKLGYRVSAKKAQLCQKEVTYLGYLLKEGKRWLTPARKATVMKIPPPTTPRQVREFLGTAGFCRLWIPGFASLAAPLYPLTKPSIPFIWTEEHQKAFDRIKEALLSAPALALPDLTKPFTLYVDERAGVARGVLTQTLGPWRRPVAYLSKKLDPVASGWPTCLKAVAAVALLLKDADKLTLGQNVTVIASHSLESIVRQPPDRWMTNARMTHYQSLLLNERVSFAPPAVLNPATLLPVESEATPVHRCSEILAEETGTRRDLKDQPLPGVPAWYTDGSSFIAEGKRRAGAAIVDGKRTVWASSLPEGTSAQKAELVALTQALRLAEGKDINIYTDSRYAFATAHIHGAIYKQRGWLTSAGKDIKNKEEILALLEAIHLPKRVAIIHCPGHQKGNDPVATGNRRADEAAKQAALSTRVLAETTKPAGKRTADGSEFEKRTADGSEFESPKKKAKVE

SEQ ID NO: 7179 - protein, 2094 aa, synthetic construct
MPAAKRVKLDGGDKKYSIGLDIGTNSVGWAVITDEYKVPSKKFKVLGNTDRHSIKKNLIGALLFDSGETAEATRLKRTARRRYTRRKNRICYLQEIFSNEMAKVDDSFFHRLEESFLVEEDKKHERHPIFGNIVDEVAYHEKYPTIYHLRKKLVDSTDKADLRLIYLALAHMIKFRGHFLIEGDLNPDNSDVDKLFIQLVQTYNQLFEENPINASGVDAKAILSARLSKSRRLENLIAQLPGEKKNGLFGNLIALSLGLTPNFKSNFDLAEDAKLQLSKDTYDDDLDNLLAQIGDQYADLFLAAKNLSDAILLSDILRVNTEITKAPLSASMIKRYDEHHQDLTLLKALVRQQLPEKYKEIFFDQSKNGYAGYIDGGASQEEFYKFIKPILEKMDGTEELLVKLNREDLLRKQRTFDNGSIPHQIHLGELHAILRRQEDFYPFLKDNREKIEKILTFRIPYYVGPLARGNSRFAWMTRKSEETITPWNFEEVVDKGASAQSFIERMTNFDKNLPNEKVLPKHSLLYEYFTVYNELTKVKYVTEGMRKPAFLSGEQKKAIVDLLFKTNRKVTVKQLKEDYFKKIECFDSVEISGVEDRFNASLGTYHDLLKIIKDKDFLDNEENEDILEDIVLTLTLFEDREMIEERLKTYAHLFDDKVMKQLKRRRYTGWGRLSRKLINGIRDKQSGKTILDFLKSDGFANRNFMQLIHDDSLTFKEDIQKAQVSGQGDSLHEHIANLAGSPAIKKGILQTVKVVDELVKVMGRHKPENIVIEMARENQTTQKGQKNSRERMKRIEEGIKELGSQILKEHPVENTQLQNEKLYLYYLQNGRDMYVDQELDINRLSDYDVDHIVPQSFLKDDSIDNKVLTRSDKARGKSDNVPSEEVVKKMKNYWRQLLNAKLITQRKFDNLTKAERGGLSELDKAGFIKRQLVETRQITKHVAQILDSRMNTKYDENDKLIREVKVITLKSKLVSDFRKDFQFYKVREINNYHHAHDAYLNAVVGTALIKKYPKLESEFVYGDYKVYDVRKMIAKSEQEIGKATAKYFFYSNIMNFFKTEITLANGEIRKRPLIETNGETGEIVWDKGRDFATVRKVLSMPQVNIVKKTEVQTGGFSKESILPKRNSDKLIARKKDWDPKKYGGFDSPTVAYSVLVVAKVEKGKSKKLKSVKELLGITIMERSSFEKNPIDFLEAKGYKEVKKDLIIKLPKYSLFELENGRKRMLASAGELQKGNELALPSKYVNFLYLASHYEKLKGSPEDNEQKQLFVEQHKHYLDEIIEQISEFSKRVILADANLDKVLSAYNKHRDKPIREQAENIIHLFTLTNLGAPAAFKYFDTTIDRKRYTSTKEVLDATLIHQSITGLYETRIDLSQLGGDGGPAPGGSGSSGGTLNIEDEYRLHETSKEPDVPLGSTWLSDFPQAWAETGGMGLAVRQAPLIIPLKATSTPVSIKQYPMSQEARLGIKPHIQRLLDQGILVPCQSPWNTPLLPVKKPGTNDYRPVQDLREVNKRVEDIHPTVPNPYNLLSGLPPSHQWYTVLDLKDAFFCLRLHPTSQPLFAFEWRDPEMGISGQLTWTRLPQGFKNSPTLFNEALHRDLADFRIQHPDLILLQYVDDLLLAATSEQDCQRGTRALLQTLGNLGYRASAKKAQICQKQVKYLGYLLKEGQRWLTEARKETVMGQPTPKTPRQLREFLGTAGFCRLWIPGFAEMAAPLYPLTKPGTLFNWGPDQQKAYQEIKQALLTAPALGLPDLTKPFELFVDEKQGYAKGVLTQKLGPWRRPVAYLSKKLDPVAAGWPPCLRMVAAIAVLTKDAGKLTMGQPLVILAPHAVEALVKQPPDRWLSNARMTHYQAMLLDTDRVQFGPVVALNPATLLPLPEKEAPHDCLEILAETHGTRPDLTDQPIPDADYTWYTDGSSFLQEGQRRAGAAVTTETEVIWARALPAGTSAQRAELIALTQALKMAEGKKLNVYTDSRYAFATAHVHGEIYRRRGWLTSEGREIKNKNEILALLKALFLPKRLSIIHCPGHQKGNSAEARGNRMADQAAREAAMKAVLETSTLLAGKRTADGSEFEKRTADGSEFESPKKKAKVE

SEQ ID NO: 7180 - protein, 2094 aa, synthetic construct
MPAAKRVKLDGGDKKYSIGLDIGTNSVGWAVITDEYKVPSKKFKVLGNTDRHSIKKNLIGALLFDSGETAEATRLKRTARRRYTRRKNRICYLQEIFSNEMAKVDDSFFHRLEESFLVEEDKKHERHPIFGNIVDEVAYHEKYPTIYHLRKKLVDSTDKADLRLIYLALAHMIKFRGHFLIEGDLNPDNSDVDKLFIQLVQTYNQLFEENPINASGVDAKAILSARLSKSRRLENLIAQLPGEKKNGLFGNLIALSLGLTPNFKSNFDLAEDAKLQLSKDTYDDDLDNLLAQIGDQYADLFLAAKNLSDAILLSDILRVNTEITKAPLSASMIKRYDEHHQDLTLLKALVRQQLPEKYKEIFFDQSKNGYAGYIDGGASQEEFYKFIKPILEKMDGTEELLVKLNREDLLRKQRTFDNGSIPHQIHLGELHAILRRQEDFYPFLKDNREKIEKILTFRIPYYVGPLARGNSRFAWMTRKSEETITPWNFEEVVDKGASAQSFIERMTNFDKNLPNEKVLPKHSLLYEYFTVYNELTKVKYVTEGMRKPAFLSGEQKKAIVDLLFKTNRKVTVKQLKEDYFKKIECFDSVEISGVEDRFNASLGTYHDLLKIIKDKDFLDNEENEDILEDIVLTLTLFEDREMIEERLKTYAHLFDDKVMKQLKRRRYTGWGRLSRKLINGIRDKQSGKTILDFLKSDGFANRNFMQLIHDDSLTFKEDIQKAQVSGQGDSLHEHIANLAGSPAIKKGILQTVKVVDELVKVMGRHKPENIVIEMARENQTTQKGQKNSRERMKRIEEGIKELGSQILKEHPVENTQLQNEKLYLYYLQNGRDMYVDQELDINRLSDYDVDHIVPQSFLKDDSIDNKVLTRSDKARGKSDNVPSEEVVKKMKNYWRQLLNAKLITQRKFDNLTKAERGGLSELDKAGFIKRQLVETRQITKHVAQILDSRMNTKYDENDKLIREVKVITLKSKLVSDFRKDFQFYKVREINNYHHAHDAYLNAVVGTALIKKYPKLESEFVYGDYKVYDVRKMIAKSEQEIGKATAKYFFYSNIMNFFKTEITLANGEIRKRPLIETNGETGEIVWDKGRDFATVRKVLSMPQVNIVKKTEVQTGGFSKESILPKRNSDKLIARKKDWDPKKYGGFDSPTVAYSVLVVAKVEKGKSKKLKSVKELLGITIMERSSFEKNPIDFLEAKGYKEVKKDLIIKLPKYSLFELENGRKRMLASAGELQKGNELALPSKYVNFLYLASHYEKLKGSPEDNEQKQLFVEQHKHYLDEIIEQISEFSKRVILADANLDKVLSAYNKHRDKPIREQAENIIHLFTLTNLGAPAAFKYFDTTIDRKRYTSTKEVLDATLIHQSITGLYETRIDLSQLGGDGGPAPGGSGSSGGTLNIEDEYRLHETSKEPDVPLGSTWLSDFPQAWAETGGMGLAVRQAPLIIPLKATSTPVSIKQYPMSQEARLGIKPHIQRLLDQGILVPCQSPWNTPLLPVKKPGTNDYRPVQDLREVNKRVEDIHPTVPNPYNLLSGLPPSHQWYTVLDLKDAFFCLRLHPTSQPLFAFEWRDPEMGISGQLTWTRLPQGFKNSPTLFNEALHRDLADFRIQHPDLILLQYVDDLLLAATSEQDCQRGTRALLQTLGNLGYRASAKKAQICQKQVKYLGYLLKEGQRWLTEARKETVMGQPTPKTPRQLREFLGKAGFCRLFIPGFAEMAAPLYPLTKPGTLFNWGPDQQKAYQEIKQALLTAPALGLPDLTKPFELFVDEKQGYAKGVLTQKLGPWRRPVAYLSKKLDPVAAGWPPCLRMVAAIAVLTKDAGKLTMGQPLVILAPHAVEALVKQPPDRWLSNARMTHYQAMLLDTDRVQFGPVVALNPATLLPLPEKEAPHDCLEILAETHGTRPDLTDQPIPDADYTWYTDGSSFLQEGQRRAGAAVTTETEVIWARALPAGTSAQRAELIALTQALKMAEGKKLNVYTDSRYAFATAHVHGEIYRRRGWLTSEGREIKNKNEILALLKALFLPKRLSIIHCPGHQKGNSAEARGNRMADQAAREAAMKAVLETSTLLAGKRTADGSEFEKRTADGSEFESPKKKAKVE

SEQ ID NO: 7181 - protein, 2096 aa, synthetic construct
MPAAKRVKLDGGDKKYSIGLDIGTNSVGWAVITDEYKVPSKKFKVLGNTDRHSIKKNLIGALLFDSGETAEATRLKRTARRRYTRRKNRICYLQEIFSNEMAKVDDSFFHRLEESFLVEEDKKHERHPIFGNIVDEVAYHEKYPTIYHLRKKLVDSTDKADLRLIYLALAHMIKFRGHFLIEGDLNPDNSDVDKLFIQLVQTYNQLFEENPINASGVDAKAILSARLSKSRRLENLIAQLPGEKKNGLFGNLIALSLGLTPNFKSNFDLAEDAKLQLSKDTYDDDLDNLLAQIGDQYADLFLAAKNLSDAILLSDILRVNTEITKAPLSASMIKRYDEHHQDLTLLKALVRQQLPEKYKEIFFDQSKNGYAGYIDGGASQEEFYKFIKPILEKMDGTEELLVKLNREDLLRKQRTFDNGSIPHQIHLGELHAILRRQEDFYPFLKDNREKIEKILTFRIPYYVGPLARGNSRFAWMTRKSEETITPWNFEEVVDKGASAQSFIERMTNFDKNLPNEKVLPKHSLLYEYFTVYNELTKVKYVTEGMRKPAFLSGEQKKAIVDLLFKTNRKVTVKQLKEDYFKKIECFDSVEISGVEDRFNASLGTYHDLLKIIKDKDFLDNEENEDILEDIVLTLTLFEDREMIEERLKTYAHLFDDKVMKQLKRRRYTGWGRLSRKLINGIRDKQSGKTILDFLKSDGFANRNFMQLIHDDSLTFKEDIQKAQVSGQGDSLHEHIANLAGSPAIKKGILQTVKVVDELVKVMGRHKPENIVIEMARENQTTQKGQKNSRERMKRIEEGIKELGSQILKEHPVENTQLQNEKLYLYYLQNGRDMYVDQELDINRLSDYDVDHIVPQSFLKDDSIDNKVLTRSDKARGKSDNVPSEEVVKKMKNYWRQLLNAKLITQRKFDNLTKAERGGLSELDKAGFIKRQLVETRQITKHVAQILDSRMNTKYDENDKLIREVKVITLKSKLVSDFRKDFQFYKVREINNYHHAHDAYLNAVVGTALIKKYPKLESEFVYGDYKVYDVRKMIAKSEQEIGKATAKYFFYSNIMNFFKTEITLANGEIRKRPLIETNGETGEIVWDKGRDFATVRKVLSMPQVNIVKKTEVQTGGFSKESILPKRNSDKLIARKKDWDPKKYGGFDSPTVAYSVLVVAKVEKGKSKKLKSVKELLGITIMERSSFEKNPIDFLEAKGYKEVKKDLIIKLPKYSLFELENGRKRMLASAGELQKGNELALPSKYVNFLYLASHYEKLKGSPEDNEQKQLFVEQHKHYLDEIIEQISEFSKRVILADANLDKVLSAYNKHRDKPIREQAENIIHLFTLTNLGAPAAFKYFDTTIDRKRYTSTKEVLDATLIHQSITGLYETRIDLSQLGGDGGPAPGSSGGSGGTAPLEEEYRLFLEAPIQNVTLLEQWKREIPKVWAEINPPGLASTQAPIHVQLLSTALPVRVRQYPITLEAKRSLRETIRKFRAAGILRPVHSPWNTPLLPVRKSGTSEYRMVQDLREVNKRVETIHPTVPNPYTLLSLLPPDRIWYSVLDLKDAFFCIPLAPESQLIFAFEWADAEEGESGQLTWTRLPQGFKNSPTLFNEALNRDLQGFRLDHPSVSLLQYVDDLLIAADTQAACLSATRDLLMTLAELGYRVSGKKAQLCQEEVTYLGFKIHKGSRSLSNSRTQAILQIPVPKTKRQVREFLGTIGYCRLWIPGFAELAQPLYAATRPGNDPLVWGEKEEEAFQSLKLALTQPPALALPSLDKPFQLFVEETSGAAKGVLTQALGPWKRPVAYLSKRLDPVAAGWPRCLRAIAAAALLTREASKLTFGQDIEITSSHNLESLLRSPPDKWLTNARITQYQVLLLDPPRVRFKQTAALNPATLLPETDDTLPIHHCLDTLDSLTSTRPDLTDQPLAQAEATLFTDGSSYIRDGKRYAGAAVVTLDSVIWAEPLPIGTSAQKAELIALTKALEWSKDKSVNIYTDSRYAFATLHVHGMIYRERGWLTAGGKAIKNAPEILALLTAVWLPKRVAVMHCKGHQKDDAPTSTGNRRADEVAREVAIRPLSTQATISAGKRTADGSEFEKRTADGSEFESPKKKAKVE

SEQ ID NO: 7182 - protein, 2093 aa, synthetic construct
MPAAKRVKLDGGDKKYSIGLDIGTNSVGWAVITDEYKVPSKKFKVLGNTDRHSIKKNLIGALLFDSGETAEATRLKRTARRRYTRRKNRICYLQEIFSNEMAKVDDSFFHRLEESFLVEEDKKHERHPIFGNIVDEVAYHEKYPTIYHLRKKLVDSTDKADLRLIYLALAHMIKFRGHFLIEGDLNPDNSDVDKLFIQLVQTYNQLFEENPINASGVDAKAILSARLSKSRRLENLIAQLPGEKKNGLFGNLIALSLGLTPNFKSNFDLAEDAKLQLSKDTYDDDLDNLLAQIGDQYADLFLAAKNLSDAILLSDILRVNTEITKAPLSASMIKRYDEHHQDLTLLKALVRQQLPEKYKEIFFDQSKNGYAGYIDGGASQEEFYKFIKPILEKMDGTEELLVKLNREDLLRKQRTFDNGSIPHQIHLGELHAILRRQEDFYPFLKDNREKIEKILTFRIPYYVGPLARGNSRFAWMTRKSEETITPWNFEEVVDKGASAQSFIERMTNFDKNLPNEKVLPKHSLLYEYFTVYNELTKVKYVTEGMRKPAFLSGEQKKAIVDLLFKTNRKVTVKQLKEDYFKKIECFDSVEISGVEDRFNASLGTYHDLLKIIKDKDFLDNEENEDILEDIVLTLTLFEDREMIEERLKTYAHLFDDKVMKQLKRRRYTGWGRLSRKLINGIRDKQSGKTILDFLKSDGFANRNFMQLIHDDSLTFKEDIQKAQVSGQGDSLHEHIANLAGSPAIKKGILQTVKVVDELVKVMGRHKPENIVIEMARENQTTQKGQKNSRERMKRIEEGIKELGSQILKEHPVENTQLQNEKLYLYYLQNGRDMYVDQELDINRLSDYDVDHIVPQSFLKDDSIDNKVLTRSDKARGKSDNVPSEEVVKKMKNYWRQLLNAKLITQRKFDNLTKAERGGLSELDKAGFIKRQLVETRQITKHVAQILDSRMNTKYDENDKLIREVKVITLKSKLVSDFRKDFQFYKVREINNYHHAHDAYLNAVVGTALIKKYPKLESEFVYGDYKVYDVRKMIAKSEQEIGKATAKYFFYSNIMNFFKTEITLANGEIRKRPLIETNGETGEIVWDKGRDFATVRKVLSMPQVNIVKKTEVQTGGFSKESILPKRNSDKLIARKKDWDPKKYGGFDSPTVAYSVLVVAKVEKGKSKKLKSVKELLGITIMERSSFEKNPIDFLEAKGYKEVKKDLIIKLPKYSLFELENGRKRMLASAGELQKGNELALPSKYVNFLYLASHYEKLKGSPEDNEQKQLFVEQHKHYLDEIIEQISEFSKRVILADANLDKVLSAYNKHRDKPIREQAENIIHLFTLTNLGAPAAFKYFDTTIDRKRYTSTKEVLDATLIHQSITGLYETRIDLSQLGGDGGPAPGSSGGSGGTLQLEEEYRLFEPESTQKQEMDIWLKNFPQAWAETGGMGTAHCQAPVLIQLKATATPISIRQYPMPHEAYQGIKPHIRRMLDQGILKPCQSPWNTPLLPVKKPGTEDYRPVQDLREVNKRVEDIHPTVPNPYNLLSTLPPSHPWYTVLDLKDAFFCLRLHSESQLLFAFEWRDPEIGLSGQLTWTRLPQGFKNSPTLFNEALHSDLADFRVRYPALVLLQYVDDLLLAAATRTECLEGTKALLETLGNKGYRASAKKAQICLQEVTYLGYSLKDGQRWLTKARKEAILSIPVPKNSRQVREFLGTAGYCRLWIPGFAELAAPLYPLTRPGTLFQWGTEQQLAFEDIKKALLSSPALGLPDITKPFELFIDENSGFAKGVLVQKLGPWKRPVAYLSKKLDTVASGWPPCLRMVAAIAILVKDAGKLTLGQPLTILTSHPVEALVRQPPNKWLSNARMTHYQAMLLDAERVHFGPTVSLNPATLLPLPSGGNHHDCLQILAETHGTRPDLTDQPLPDADLTWYTDGSSFIRNGEREAGAAVTTESEVIWAAPLPPGTSAQRAELIALTQALKMAEGKKLTVYTDSRYAFATTHVHGEIYRRRGWLTSEGKEIKNKNEILALLEALFLPKRLSIIHCPGHQKGDSPQAKGNRLADDTAKKAATETHSSLTVLPAGKRTADGSEFEKRTADGSEFESPKKKAKVE

SEQ ID NO: 7183 - protein, 2216 aa, synthetic construct
MPAAKRVKLDGGDKKYSIGLDIGTNSVGWAVITDEYKVPSKKFKVLGNTDRHSIKKNLIGALLFDSGETAEATRLKRTARRRYTRRKNRICYLQEIFSNEMAKVDDSFFHRLEESFLVEEDKKHERHPIFGNIVDEVAYHEKYPTIYHLRKKLVDSTDKADLRLIYLALAHMIKFRGHFLIEGDLNPDNSDVDKLFIQLVQTYNQLFEENPINASGVDAKAILSARLSKSRRLENLIAQLPGEKKNGLFGNLIALSLGLTPNFKSNFDLAEDAKLQLSKDTYDDDLDNLLAQIGDQYADLFLAAKNLSDAILLSDILRVNTEITKAPLSASMIKRYDEHHQDLTLLKALVRQQLPEKYKEIFFDQSKNGYAGYIDGGASQEEFYKFIKPILEKMDGTEELLVKLNREDLLRKQRTFDNGSIPHQIHLGELHAILRRQEDFYPFLKDNREKIEKILTFRIPYYVGPLARGNSRFAWMTRKSEETITPWNFEEVVDKGASAQSFIERMTNFDKNLPNEKVLPKHSLLYEYFTVYNELTKVKYVTEGMRKPAFLSGEQKKAIVDLLFKTNRKVTVKQLKEDYFKKIECFDSVEISGVEDRFNASLGTYHDLLKIIKDKDFLDNEENEDILEDIVLTLTLFEDREMIEERLKTYAHLFDDKVMKQLKRRRYTGWGRLSRKLINGIRDKQSGKTILDFLKSDGFANRNFMQLIHDDSLTFKEDIQKAQVSGQGDSLHEHIANLAGSPAIKKGILQTVKVVDELVKVMGRHKPENIVIEMARENQTTQKGQKNSRERMKRIEEGIKELGSQILKEHPVENTQLQNEKLYLYYLQNGRDMYVDQELDINRLSDYDVDHIVPQSFLKDDSIDNKVLTRSDKARGKSDNVPSEEVVKKMKNYWRQLLNAKLITQRKFDNLTKAERGGLSELDKAGFIKRQLVETRQITKHVAQILDSRMNTKYDENDKLIREVKVITLKSKLVSDFRKDFQFYKVREINNYHHAHDAYLNAVVGTALIKKYPKLESEFVYGDYKVYDVRKMIAKSEQEIGKATAKYFFYSNIMNFFKTEITLANGEIRKRPLIETNGETGEIVWDKGRDFATVRKVLSMPQVNIVKKTEVQTGGFSKESILPKRNSDKLIARKKDWDPKKYGGFDSPTVAYSVLVVAKVEKGKSKKLKSVKELLGITIMERSSFEKNPIDFLEAKGYKEVKKDLIIKLPKYSLFELENGRKRMLASAGELQKGNELALPSKYVNFLYLASHYEKLKGSPEDNEQKQLFVEQHKHYLDEIIEQISEFSKRVILADANLDKVLSAYNKHRDKPIREQAENIIHLFTLTNLGAPAAFKYFDTTIDRKRYTSTKEVLDATLIHQSITGLYETRIDLSQLGGDGGPAPGSSGGSGGTLGDQGSRGSDPLPEPRVTLTVEGIPTEFLVNTGAEHSVLTKPMGKMGSKRTVVAGATGSKVYPWTTKRLLKIGQKQVTHSFLVIPECPAPLLGRDLLTKLKAQIQFSTEGPQVTWEDRPAMCLVLNLEEEYRLHEKPVPPSIDPSWLQLFPMVWAEKAGMGLANQVPPVVVELKSDASPVAVRQYPMSKEAREGIRPHIQRFLDLGILVPCQSPWNTPLLPVKKPGTNDYRPVQDLREVNKRVQDIHPTVPNPYNLLSSLPPSHTWYSVLDLKDAFFCLKLHPNSQPLFAFEWRDPEKGNTGQLTWTRLPQGFKNSPTLFDEALHRDLASFRALNPQVVMLQYVDDLLVAAPTYRDCKEGTRRLLQELSKLGYRVSAKKAQLCREEVTYLGYLLKGGKRWLTPARKATVMKIPTPTTPRQVREFLGTAGFCRLWIPGFASLAAPLYPLTREKVPFTWTEAHQEAFGRIKEALLSAPALALPDLTKPFALYVDEKEGVARGVLTQTLGPWRRPVAYLSKKLDPVASGWPTCLKAIAAVALLLKDADKLTLGQNVLVIAPHNLESIVRQPPDRWMTNARMTHYQSLLLNERVSFAPPAILNPATLLPVESDDTPIHICSEILAEETGTRPDLRDQPLPGVPAWYTDGSSFIMDGRRQAGAAIVDNKRTVWASNLPEGTSAQKAELIALTQALRLAEGKSINIYTDSRYAFATAHVHGAIYKQRGLLTSAGKDIKNKEEILALLEAIHLPKRVAIIHCPGHQRGTDPVATGNRKADEAAKQAAQSTRILTETTKNAGKRTADGSEFEKRTADGSEFESPKKKAKVE

SEQ ID NO: 7184 - protein, 2216 aa, synthetic construct
MPAAKRVKLDGGDKKYSIGLDIGTNSVGWAVITDEYKVPSKKFKVLGNTDRHSIKKNLIGALLFDSGETAEATRLKRTARRRYTRRKNRICYLQEIFSNEMAKVDDSFFHRLEESFLVEEDKKHERHPIFGNIVDEVAYHEKYPTIYHLRKKLVDSTDKADLRLIYLALAHMIKFRGHFLIEGDLNPDNSDVDKLFIQLVQTYNQLFEENPINASGVDAKAILSARLSKSRRLENLIAQLPGEKKNGLFGNLIALSLGLTPNFKSNFDLAEDAKLQLSKDTYDDDLDNLLAQIGDQYADLFLAAKNLSDAILLSDILRVNTEITKAPLSASMIKRYDEHHQDLTLLKALVRQQLPEKYKEIFFDQSKNGYAGYIDGGASQEEFYKFIKPILEKMDGTEELLVKLNREDLLRKQRTFDNGSIPHQIHLGELHAILRRQEDFYPFLKDNREKIEKILTFRIPYYVGPLARGNSRFAWMTRKSEETITPWNFEEVVDKGASAQSFIERMTNFDKNLPNEKVLPKHSLLYEYFTVYNELTKVKYVTEGMRKPAFLSGEQKKAIVDLLFKTNRKVTVKQLKEDYFKKIECFDSVEISGVEDRFNASLGTYHDLLKIIKDKDFLDNEENEDILEDIVLTLTLFEDREMIEERLKTYAHLFDDKVMKQLKRRRYTGWGRLSRKLINGIRDKQSGKTILDFLKSDGFANRNFMQLIHDDSLTFKEDIQKAQVSGQGDSLHEHIANLAGSPAIKKGILQTVKVVDELVKVMGRHKPENIVIEMARENQTTQKGQKNSRERMKRIEEGIKELGSQILKEHPVENTQLQNEKLYLYYLQNGRDMYVDQELDINRLSDYDVDHIVPQSFLKDDSIDNKVLTRSDKARGKSDNVPSEEVVKKMKNYWRQLLNAKLITQRKFDNLTKAERGGLSELDKAGFIKRQLVETRQITKHVAQILDSRMNTKYDENDKLIREVKVITLKSKLVSDFRKDFQFYKVREINNYHHAHDAYLNAVVGTALIKKYPKLESEFVYGDYKVYDVRKMIAKSEQEIGKATAKYFFYSNIMNFFKTEITLANGEIRKRPLIETNGETGEIVWDKGRDFATVRKVLSMPQVNIVKKTEVQTGGFSKESILPKRNSDKLIARKKDWDPKKYGGFDSPTVAYSVLVVAKVEKGKSKKLKSVKELLGITIMERSSFEKNPIDFLEAKGYKEVKKDLIIKLPKYSLFELENGRKRMLASAGELQKGNELALPSKYVNFLYLASHYEKLKGSPEDNEQKQLFVEQHKHYLDEIIEQISEFSKRVILADANLDKVLSAYNKHRDKPIREQAENIIHLFTLTNLGAPAAFKYFDTTIDRKRYTSTKEVLDATLIHQSITGLYETRIDLSQLGGDGGPAPGSSGGSGGTLGDQGSRGSDPLPEPRVTLTVEGIPTEFLVNTGAEHSVLTKPMGKMGSKRTVVAGATGSKVYPWTTKRLLKIGQKQVTHSFLVIPECPAPLLGRDLLTKLKAQIQFSTEGPQVTWEDRPAMCLVLNLEEEYRLHEKPVPPSIDPSWLQLFPMVWAEKAGMGLANQVPPVVVELKSDASPVAVRQYPMSKEAREGIRPHIQRFLDLGILVPCQSPWNTPLLPVKKPGTNDYRPVQDLREVNKRVQDIHPTVPNPYNLLSSLPPSHTWYSVLDLKDAFFCLKLHPNSQPLFAFEWRDPEKGNTGQLTWTRLPQGFKNSPTLFNEALHRDLASFRALNPQVVMLQYVDDLLVAAPTYRDCKEGTRRLLQELSKLGYRVSAKKAQLCREEVTYLGYLLKGGKRWLTPARKATVMKIPTPTTPRQVREFLGKAGFCRLFIPGFASLAAPLYPLTRPKVPFTWTEAHQEAFGRIKEALLSAPALALPDLTKPFALYVDEKEGVARGVLTQTLGPWRRPVAYLSKKLDPVASGWPTCLKAIAAVALLLKDADKLTLGQNVLVIAPHNLESIVRQPPDRWMTNARMTHYQSLLLNERVSFAPPAILNPATLLPVESDDTPIHICSEILAEETGTRPDLRDQPLPGVPAWYTDGSSFIMDGRRQAGAAIVDNKRTVWASNLPEGTSAQKAELIALTQALRLAEGKSINIYTDSRYAFATAHVHGAIYKQRGWLTSAGKDIKNKEEILALLEAIHLPKRVAIIHCPGHQRGTDPVATGNRKADEAAKQAAQSTRILTETTKNAGKRTADGSEFEKRTADGSEFESPKKKAKVE

SEQ ID NO: 7185 - protein, 2094 aa, synthetic construct
MPAAKRVKLDGGDKKYSIGLDIGTNSVGWAVITDEYKVPSKKFKVLGNTDRHSIKKNLIGALLFDSGETAEATRLKRTARRRYTRRKNRICYLQEIFSNEMAKVDDSFFHRLEESFLVEEDKKHERHPIFGNIVDEVAYHEKYPTIYHLRKKLVDSTDKADLRLIYLALAHMIKFRGHFLIEGDLNPDNSDVDKLFIQLVQTYNQLFEENPINASGVDAKAILSARLSKSRRLENLIAQLPGEKKNGLFGNLIALSLGLTPNFKSNFDLAEDAKLQLSKDTYDDDLDNLLAQIGDQYADLFLAAKNLSDAILLSDILRVNTEITKAPLSASMIKRYDEHHQDLTLLKALVRQQLPEKYKEIFFDQSKNGYAGYIDGGASQEEFYKFIKPILEKMDGTEELLVKLNREDLLRKQRTFDNGSIPHQIHLGELHAILRRQEDFYPFLKDNREKIEKILTFRIPYYVGPLARGNSRFAWMTRKSEETITPWNFEEVVDKGASAQSFIERMTNFDKNLPNEKVLPKHSLLYEYFTVYNELTKVKYVTEGMRKPAFLSGEQKKAIVDLLFKTNRKVTVKQLKEDYFKKIECFDSVEISGVEDRFNASLGTYHDLLKIIKDKDFLDNEENEDILEDIVLTLTLFEDREMIEERLKTYAHLFDDKVMKQLKRRRYTGWGRLSRKLINGIRDKQSGKTILDFLKSDGFANRNFMQLIHDDSLTFKEDIQKAQVSGQGDSLHEHIANLAGSPAIKKGILQTVKVVDELVKVMGRHKPENIVIEMARENQTTQKGQKNSRERMKRIEEGIKELGSQILKEHPVENTQLQNEKLYLYYLQNGRDMYVDQELDINRLSDYDVDHIVPQSFLKDDSIDNKVLTRSDKARGKSDNVPSEEVVKKMKNYWRQLLNAKLITQRKFDNLTKAERGGLSELDKAGFIKRQLVETRQITKHVAQILDSRMNTKYDENDKLIREVKVITLKSKLVSDFRKDFQFYKVREINNYHHAHDAYLNAVVGTALIKKYPKLESEFVYGDYKVYDVRKMIAKSEQEIGKATAKYFFYSNIMNFFKTEITLANGEIRKRPLIETNGETGEIVWDKGRDFATVRKVLSMPQVNIVKKTEVQTGGFSKESILPKRNSDKLIARKKDWDPKKYGGFDSPTVAYSVLVVAKVEKGKSKKLKSVKELLGITIMERSSFEKNPIDFLEAKGYKEVKKDLIIKLPKYSLFELENGRKRMLASAGELQKGNELALPSKYVNFLYLASHYEKLKGSPEDNEQKQLFVEQHKHYLDEIIEQISEFSKRVILADANLDKVLSAYNKHRDKPIREQAENIIHLFTLTNLGAPAAFKYFDTTIDRKRYTSTKEVLDATLIHQSITGLYETRIDLSQLGGDGGPAPGSSGGSGGLGIEDEYRLHETSTEPDVSLGSTWLSDFPQAWAETGGMGLAVRQAPLIIPLKATSTPVSIQQYPMSHEARLGIKPHIQRLLDQGILVPCQSPWNTPLLPVKKPGTNDYRPVQDLREVNKRVEDIHPTVPNPYNLLSGLPPSHQWYTVLDLKDAFFCLRLHPTSQPLFAFEWRDPGMGISGQLTWTRLPQGFKNSPTLFNEALHRDLADFRIQHPDLILLQYVDDILLAATSELDCQQGTRALLQTLGDLGYRASAKKAQICQKQVKYLGYLLREGQRWLTEARKETVMGQPVPKTPRQLREFLGKAGFCRLFIPGFAEMAAPLYPLTKPGTLFSWGPDQQKAYQEIKQALLTAPALGLPDLTKPFELFVDEKQGYAKGVLTQKLGPWRRPVAYLSKKLDPVAAGWPPCLRMVAAIAVLTKDAGKLTMGQPLVILAPHAVEALVKQPPDRWLSNARMTHYQAMLLDTDRVQFGPVVALNPATLLPLPEEGAPHDCLEILAETHGTRPDLTDQPIPDADHTWYTDGSSFLQEGQRKAGAAVTTETEVIWAGALPAGTSAQRAELIALTQALKMAEGKRLNVYTDSRYAFATAHIHGEIYRRRGWLTSEGREIKNKSEILALLKALFLPKRLSIIHCLGHQKGDSAEARGNRLADQAAREAAIKTPPDTSTLLIAGKRTADGSEFEKRTADGSEFESPKKKAKVE

SEQ ID NO: 7186 - protein, 2094 aa, synthetic construct; identical to SEQ ID NO: 7185

SEQ ID NO: 7187 - protein, 2088 aa, synthetic construct
MPAAKRVKLDGGDKKYSIGLDIGTNSVGWAVITDEYKVPSKKFKVLGNTDRHSIKKNLIGALLFDSGETAEATRLKRTARRRYTRRKNRICYLQEIFSNEMAKVDDSFFHRLEESFLVEEDKKHERHPIFGNIVDEVAYHEKYPTIYHLRKKLVDSTDKADLRLIYLALAHMIKFRGHFLIEGDLNPDNSDVDKLFIQLVQTYNQLFEENPINASGVDAKAILSARLSKSRRLENLIAQLPGEKKNGLFGNLIALSLGLTPNFKSNFDLAEDAKLQLSKDTYDDDLDNLLAQIGDQYADLFLAAKNLSDAILLSDILRVNTEITKAPLSASMIKRYDEHHQDLTLLKALVRQQLPEKYKEIFFDQSKNGYAGYIDGGASQEEFYKFIKPILEKMDGTEELLVKLNREDLLRKQRTFDNGSIPHQIHLGELHAILRRQEDFYPFLKDNREKIEKILTFRIPYYVGPLARGNSRFAWMTRKSEETITPWNFEEVVDKGASAQSFIERMTNFDKNLPNEKVLPKHSLLYEYFTVYNELTKVKYVTEGMRKPAFLSGEQKKAIVDLLFKTNRKVTVKQLKEDYFKKIECFDSVEISGVEDRFNASLGTYHDLLKIIKDKDFLDNEENEDILEDIVLTLTLFEDREMIEERLKTYAHLFDDKVMKQLKRRRYTGWGRLSRKLINGIRDKQSGKTILDFLKSDGFANRNFMQLIHDDSLTFKEDIQKAQVSGQGDSLHEHIANLAGSPAIKKGILQTVKVVDELVKVMGRHKPENIVIEMARENQTTQKGQKNSRERMKRIEEGIKELGSQILKEHPVENTQLQNEKLYLYYLQNGRDMYVDQELDINRLSDYDVDHIVPQSFLKDDSIDNKVLTRSDKARGKSDNVPSEEVVKKMKNYWRQLLNAKLITQRKFDNLTKAERGGLSELDKAGFIKRQLVETRQITKHVAQILDSRMNTKYDENDKLIREVKVITLKSKLVSDFRKDFQFYKVREINNYHHAHDAYLNAVVGTALIKKYPKLESEFVYGDYKVYDVRKMIAKSEQEIGKATAKYFFYSNIMNFFKTEITLANGEIRKRPLIETNGETGEIVWDKGRDFATVRKVLSMPQVNIVKKTEVQTGGFSKESILPKRNSDKLIARKKDWDPKKYGGFDSPTVAYSVLVVAKVEKGKSKKLKSVKELLGITIMERSSFEKNPIDFLEAKGYKEVKKDLIIKLPKYSLFELENGRKRMLASAGELQKGNELALPSKYVNFLYLASHYEKLKGSPEDNEQKQLFVEQHKHYLDEIIEQISEFSKRVILADANLDKVLSAYNKHRDKPIREQAENIIHLFTLTNLGAPAAFKYFDTTIDRKRYTSTKEVLDATLIHQSITGLYETRIDLSQLGGDGGPAPGSSGGSGGTLQLDDEYRLYSPLVKPDQNIQFWLEQFPQAWAETAGMGLAKQVPPQVIQLKASATPVSVRQYPLSKEAQEGIRPHVQRLIQQGILVPVQSPWNTPLLPVRKPGTNDYRPVQDLREVNKRVQDIHPTVPNPYNLLCALPPQRSWYTVLDLKDAFFCLRLHPTSQPLFAFEWRDPGTGRTGQLTWTRLPQGFKNSPTIFDEALHRDLANFRIQHPQVTLLQYVDDLLLAGATKQDCLEGTKALLLELSDLGYRASAKKAQICRREVTYLGYSLRDGQRWLTEARKKTVVQIPAPTTAKQVREFLGTAGFCRLWIPGFATLAAPLYPLTKEKGEFSWAPEHQKAFDAIKKALLSAPALALPDVTKPFTLYVDERKGVARGVLTQTLGPWRRPVAYLSKKLDPVASGWPVCLKAIAAVAILVKDADKLTLGQNITVIAPHALENIVRQPPDRWMTNARMTHYQSLLLTERVTFAPPAALNPATLLPEETDEPVTHDCHQLLIEETGVRKDLTDIPLTGEVLTWFTDGSSYVVEGKRMAGAAVVDGTRTIWASSLPEGTSAQKAELMALTQALRLAEGKSINIYTDSRYAFATAHVHGAIYKQRGLLTSAGREIKNKEEILSLLEALHLPKRLAIIHCPGHQKAKDPISRGNQMADRVAKQAAQGVNLLAGKRTADGSEFEKRTADGSEFESPKKKAKVE

SEQ ID NO: 7188 - protein, 2085 aa, synthetic construct
MPAAKRVKLDGGDKKYSIGLDIGTNSVGWAVITDEYKVPSKKFKVLGNTDRHSIKKNLIGALLFDSGETAEATRLKRTARRRYTRRKNRICYLQEIFSNEMAKVDDSFFHRLEESFLVEEDKKHERHPIFGNIVDEVAYHEKYPTIYHLRKKLVDSTDKADLRLIYLALAHMIKFRGHFLIEGDLNPDNSDVDKLFIQLVQTYNQLFEENPINASGVDAKAILSARLSKSRRLENLIAQLPGEKKNGLFGNLIALSLGLTPNFKSNFDLAEDAKLQLSKDTYDDDLDNLLAQIGDQYADLFLAAKNLSDAILLSDILRVNTEITKAPLSASMIKRYDEHHQDLTLLKALVRQQLPEKYKEIFFDQSKNGYAGYIDGGASQEEFYKFIKPILEKMDGTEELLVKLNREDLLRKQRTFDNGSIPHQIHLGELHAILRRQEDFYPFLKDNREKIEKILTFRIPYYVGPLARGNSRFAWMTRKSEETITPWNFEEVVDKGASAQSFIERMTNFDKNLPNEKVLPKHSLLYEYFTVYNELTKVKYVTEGMRKPAFLSGEQKKAIVDLLFKTNRKVTVKQLKEDYFKKIECFDSVEISGVEDRFNASLGTYHDLLKIIKDKDFLDNEENEDILEDIVLTLTLFEDREMIEERLKTYAHLFDDKVMKQLKRRRYTGWGRLSRKLINGIRDKQSGKTILDFLKSDGFANRNFMQLIHDDSLTFKEDIQKAQVSGQGDSLHEHIANLAGSPAIKKGILQTVKVVDELVKVMGRHKPENIVIEMARENQTTQKGQKNSRERMKRIEEGIKELGSQILKEHPVENTQLQNEKLYLYYLQNGRDMYVDQELDINRLSDYDVDHIVPQSFLKDDSIDNKVLTRSDKARGKSDNVPSEEVVKKMKNYWRQLLNAKLITQRKFDNLTKAERGGLSELDKAGFIKRQLVETRQITKHVAQILDSRMNTKYDENDKLIREVKVITLKSKLVSDFRKDFQFYKVREINNYHHAHDAYLNAVVGTALIKKYPKLESEFVYGDYKVYDVRKMIAKSEQEIGKATAKYFFYSNIMNFFKTEITLANGEIRKRPLIETNGETGEIVWDKGRDFATVRKVLSMPQVNIVKKTEVQTGGFSKESILPKRNSDKLIARKKDWDPKKYGGFDSPTVAYSVLVVAKVEKGKSKKLKSVKELLGITIMERSSFEKNPIDFLEAKGYKEVKKDLIIKLPKYSLFELENGRKRMLASAGELQKGNELALPSKYVNFLYLASHYEKLKGSPEDNEQKQLFVEQHKHYLDEIIEQISEFSKRVILADANLDKVLSAYNKHRDKPIREQAENIIHLFTLTNLGAPAAFKYFDTTIDRKRYTSTKEVLDATLIHQSITGLYETRIDLSQLGGDGGPAPGSSGGSGGIPWLMKKPLQLTTLVPLQEYEERLLKQTMLTGSYKEKLQSLFLKYDALWQHWENQVGHRRIKPHHIATGTVNPRPQKQYPINPKAKASIQTVINDLLKQGVLIQQNSIMNTPVYPVPKPDGKWRMVLDYREVNKTIPLIAAQNQHSAGILSSIFRGKYKTTLDLSNGFWAHSITPESYWLTAFTWLGQQYCWTRLPQGFLNSPALFNADVVDLLKEVPNVQVYVDDIYISHDDPREHLEQLEKVFSLLLNAGYVVSLKKSEIAQHEVEFLGFNITKEGRGLTETFKQKLLNITPPRDLKQLQSILGKLNFARNFIPNFSELVKPLYNIIATAPGKYITWTTDNSQQLQNIISMLNSAENLEERNPEVRLIMKVNTSPSAGYIRFYNEFAKRPIMYLNYVYTKAEVKFTNTEKLLTTIHKGLIKALDLGMGQEILVYSPIVSMTKIQKTPLPERKALPIRWITWMSYLEDPRIQFHYDKTLPELQQVPTVTDDIIAKIKHPSEFSMVFYTDGSAIKHPNVNKSHNAGMGIAQVQFKPEFTVINTWSIPLGDHTAQLAEVAAVEFACKKALKIDGPVLIVTDSFYVAESVNKELPYWQSNGFFNNKKKPLKHVSKWKSIADCIQLKPDIIIIHEKGHQPTASTFHTEGNNLADKLATQGSYVVNAGKRTADGSEFEKRTADGSEFESPKKKAKVE

SEQ ID NO: 7189 - protein, 2174 aa, synthetic construct
MPAAKRVKLDGGDKKYSIGLDIGTNSVGWAVITDEYKVPSKKFKVLGNTDRHSIKKNLIGALLFDSGETAEATRLKRTARRRYTRRKNRICYLQEIFSNEMAKVDDSFFHRLEESFLVEEDKKHERHPIFGNIVDEVAYHEKYPTIYHLRKKLVDSTDKADLRLIYLALAHMIKFRGHFLIEGDLNPDNSDVDKLFIQLVQTYNQLFEENPINASGVDAKAILSARLSKSRRLENLIAQLPGEKKNGLFGNLIALSLGLTPNFKSNFDLAEDAKLQLSKDTYDDDLDNLLAQIGDQYADLFLAAKNLSDAILLSDILRVNTEITKAPLSASMIKRYDEHHQDLTLLKALVRQQLPEKYKEIFFDQSKNGYAGYIDGGASQEEFYKFIKPILEKMDGTEELLVKLNREDLLRKQRTFDNGSIPHQIHLGELHAILRRQEDFYPFLKDNREKIEKILTFRIPYYVGPLARGNSRFAWMTRKSEETITPWNFEEVVDKGASAQSFIERMTNFDKNLPNEKVLPKHSLLYEYFTVYNELTKVKYVTEGMRKPAFLSGEQKKAIVDLLFKTNRKVTVKQLKEDYFKKIECFDSVEISGVEDRFNASLGTYHDLLKIIKDKDFLDNEENEDILEDIVLTLTLFEDREMIEERLKTYAHLFDDKVMKQLKRRRYTGWGRLSRKLINGIRDKQSGKTILDFLKSDGFANRNFMQLIHDDSLTFKEDIQKAQVSGQGDSLHEHIANLAGSPAIKKGILQTVKVVDELVKVMGRHKPENIVIEMARENQTTQKGQKNSRERMKRIEEGIKELGSQILKEHPVENTQLQNEKLYLYYLQNGRDMYVDQELDINRLSDYDVDHIVPQSFLKDDSIDNKVLTRSDKARGKSDNVPSEEVVKKMKNYWRQLLNAKLITQRKFDNLTKAERGGLSELDKAGFIKRQLVETRQITKHVAQILDSRMNTKYDENDKLIREVKVITLKSKLVSDFRKDFQFYKVREINNYHHAHDAYLNAVVGTALIKKYPKLESEFVYGDYKVYDVRKMIAKSEQEIGKATAKYFFYSNIMNFFKTEITLANGEIRKRPLIETNGETGEIVWDKGRDFATVRKVLSMPQVNIVKKTEVQTGGFSKESILPKRNSDKLIARKKDWDPKKYGGFDSPTVAYSVLVVAKVEKGKSKKLKSVKELLGITIMERSSFEKNPIDFLEAKGYKEVKKDLIIKLPKYSLFELENGRKRMLASAGELQKGNELALPSKYVNFLYLASHYEKLKGSPEDNEQKQLFVEQHKHYLDEIIEQISEFSKRVILADANLDKVLSAYNKHRDKPIREQAENIIHLFTLTNLGAPAAFKYFDTTIDRKRYTSTKEVLDATLIHQSITGLYETRIDLSQLGGDGGPAPGSSGGSGGMDPLQLLQPLEAEIKGTKLKAHWNSGATITCVPQAFLEEEVPIKNIWIKTIHGEKEQPVYYLTFKIQGRKVEAEVISSPYDYILVSPSDIPWLMKKPLQLTTLVPLQEYEERLLKQTMLTGSYKEKLQSLFLKYDALWQHWENQVGHRRIKPHHIATGTVNPRPQKQYPINPKAKASIQTVINDLLKQGVLIQQNSIMNTPVYPVPKPDGKWRMVLDYREVNKTIPLIAAQNQHSAGILSSIFRGKYKTTLDLSNGFWAHSITPESYWLTAFTWLGQQYCWTRLPQGFLNSPALFNADVVDLLKEVPNVQVYVDDIYISHDDPREHLEQLEKVFSLLLNAGYVVSLKKSEIAQHEVEFLGFNITKEGRGLTETFKQKLLNITPPRDLKQLQSILGLLNFARNFIPNFSELVKPLYNIIATAPGKYITWTTDNSQQLQNIISMLNSAENLEERNPEVRLIMKVNTSPSAGYIRFYNEFAKRPIMYLNYVYTKAEVKFTNTEKLLTTIHKGLIKALDLGMGQEILVYSPIVSMTKIQKTPLPERKALPIRWITWMSYLEDPRIQFHYDKTLPELQQVPTVTDDIIAKIKHPSEFSMVFYTDGSAIKHPNVNKSHNAGMGIAQVQFKPEFTVINTWSIPLGDHTAQLAEVAAVEFACKKALKIDGPVLIVTDSFYVAESVNKELPYWQSNGFFNNKKKPLKHVSKWKSIADCIQLKPDIIIIHEKGHQPTASTFHTEGNNLADKLATQGSYVVNAGKRTADGSEFEKRTADGSEFESPKKKAKVE

SEQ ID NO: 7190 - protein, 2174 aa, synthetic construct
MPAAKRVKLDGGDKKYSIGLDIGTNSVGWAVITDEYKVPSKKFKVLGNTDRHSIKKNLIGALLFDSGETAEATRLKRTARRRYTRRKNRICYLQEIFSNEMAKVDDSFFHRLEESFLVEEDKKHERHPIFGNIVDEVAYHEKYPTIYHLRKKLVDSTDKADLRLIYLALAHMIKFRGHFLIEGDLNPDNSDVDKLFIQLVQTYNQLFEENPINASGVDAKAILSARLSKSRRLENLIAQLPGEKKNGLFGNLIALSLGLTPNFKSNFDLAEDAKLQLSKDTYDDDLDNLLAQIGDQYADLFLAAKNLSDAILLSDILRVNTEITKAPLSASMIKRYDEHHQDLTLLKALVRQQLPEKYKEIFFDQSKNGYAGYIDGGASQEEFYKFIKPILEKMDGTEELLVKLNREDLLRKQRTFDNGSIPHQIHLGELHAILRRQEDFYPFLKDNREKIEKILTFRIPYYVGPLARGNSRFAWMTRKSEETITPWNFEEVVDKGASAQSFIERMTNFDKNLPNEKVLPKHSLLYEYFTVYNELTKVKYVTEGMRKPAFLSGEQKKAIVDLLFKTNRKVTVKQLKEDYFKKIECFDSVEISGVEDRFNASLGTYHDLLKIIKDKDFLDNEENEDILEDIVLTLTLFEDREMIEERLKTYAHLFDDKVMKQLKRRRYTGWGRLSRKLINGIRDKQSGKTILDFLKSDGFANRNFMQLIHDDSLTFKEDIQKAQVSGQGDSLHEHIANLAGSPAIKKGILQTVKVVDELVKVMGRHKPENIVIEMARENQTTQKGQKNSRERMKRIEEGIKELGSQILKEHPVENTQLQNEKLYLYYLQNGRDMYVDQELDINRLSDYDVDHIVPQSFLKDDSIDNKVLTRSDKARGKSDNVPSEEVVKKMKNYWRQLLNAKLITQRKFDNLTKAERGGLSELDKAGFIKRQLVETRQITKHVAQILDSRMNTKYDENDKLIREVKVITLKSKLVSDFRKDFQFYKVREINNYHHAHDAYLNAVVGTALIKKYPKLESEFVYGDYKVYDVRKMIAKSEQEIGKATAKYFFYSNIMNFFKTEITLANGEIRKRPLIETNGETGEIVWDKGRDFATVRKVLSMPQVNIVKKTEVQTGGFSKESILPKRNSDKLIARKKDWDPKKYGGFDSPTVAYSVLVVAKVEKGKSKKLKSVKELLGITIMERSSFEKNPIDFLEAKGYKEVKKDLIIKLPKYSLFELENGRKRMLASAGELQKGNELALPSKYVNFLYLASHYEKLKGSPEDNEQKQLFVEQHKHYLDEIIEQISEFSKRVILADANLDKVLSAYNKHRDKPIREQAENIIHLFTLTNLGAPAAFKYFDTTIDRKRYTSTKEVLDATLIHQSITGLYETRIDLSQLGGDGGPAPGSSGGSGGMNPLQLLQPLPAEVKGTKLLAHWNSGATITCIPESFLEDEQPIKQTLIKTIHGEKQQNVYYLTFKVKGRKVEAEVIASPYEYILLSPTDVPWLTQQPLQLTILVPLQEYQDRILNKTALPEEQKQQLKALFTKYDNLWQHWENQVGHRKIRPHNIATGDYPPRPQKQYPINPKAKPSIQIVIDDLLKQGVLTPQNSTMNTPVYPVPKPDGRWRMVLDYREVNKTIPLTAAQNQHSAGILATIVRQKYKTTLDLANGFWAHPITPDSYWLTAFTWQGKQYCWTRLPQGFLNSPALFTADAVDLLKEVPNVQVYVDDIYLSHDNPHEHIQQLEKVFQILLQAGYVVSLKKSEIGQRTVEFLGFNITKEGRGLTDTFKTKLLNVTPPKDLKQLQSILGLLNFARNFIPNFAELVQTLYNLIASSKGKYIEWTEDNTKQLNKVIEALNTASNLEERLPDQRLVIKVNTSPSAGYVRYYNESGKKPIMYLNYVFSKAELKFSMLEKLLTTMHKALIKAMDLAMGQEILVYSPIVSMTKIQKTPLPERKALPIRWITWMTYLEDPRIQFHYDKTLPELKHIPDVYTSSIPPLKHPSQYEGVFCTDGSAIKSPDPTKSNNAGMGIVHAIYNPEYKILNQWSIPLGHHTAQMAEIAAVEFACKKALKVPGPVLVITDSFYVAESANKELPYWKSNGFVNNKKEPLKHISKWKSIAECLSIKPDITIQHEKGHQPINTSIHTEGNALADKLATQGSYVVNAGKRTADGSEFEKRTADGSEFESPKKKAKVE

SEQ ID NO: 7191 - protein, 2092 aa, synthetic construct
MPAAKRVKLDGGDKKYSIGLDIGTNSVGWAVITDEYKVPSKKFKVLGNTDRHSIKKNLIGALLFDSGETAEATRLKRTARRRYTRRKNRICYLQEIFSNEMAKVDDSFFHRLEESFLVEEDKKHERHPIFGNIVDEVAYHEKYPTIYHLRKKLVDSTDKADLRLIYLALAHMIKFRGHFLIEGDLNPDNSDVDKLFIQLVQTYNQLFEENPINASGVDAKAILSARLSKSRRLENLIAQLPGEKKNGLFGNLIALSLGLTPNFKSNFDLAEDAKLQLSKDTYDDDLDNLLAQIGDQYADLFLAAKNLSDAILLSDILRVNTEITKAPLSASMIKRYDEHHQDLTLLKALVRQQLPEKYKEIFFDQSKNGYAGYIDGGASQEEFYKFIKPILEKMDGTEELLVKLNREDLLRKQRTFDNGSIPHQIHLGELHAILRRQEDFYPFLKDNREKIEKILTFRIPYYVGPLARGNSRFAWMTRKSEETITPWNFEEVVDKGASAQSFIERMTNFDKNLPNEKVLPKHSLLYEYFTVYNELTKVKYVTEGMRKPAFLSGEQKKAIVDLLFKTNRKVTVKQLKEDYFKKIECFDSVEISGVEDRFNASLGTYHDLLKIIKDKDFLDNEENEDILEDIVLTLTLFEDREMIEERLKTYAHLFDDKVMKQLKRRRYTGWGRLSRKLINGIRDKQSGKTILDFLKSDGFANRNFMQLIHDDSLTFKEDIQKAQVSGQGDSLHEHIANLAGSPAIKKGILQTVKVVDELVKVMGRHKPENIVIEMARENQTTQKGQKNSRERMKRIEEGIKELGSQILKEHPVENTQLQNEKLYLYYLQNGRDMYVDQELDINRLSDYDVDHIVPQSFLKDDSIDNKVLTRSDKARGKSDNVPSEEVVKKMKNYWRQLLNAKLITQRKFDNLTKAERGGLSELDKAGFIKRQLVETRQITKHVAQILDSRMNTKYDENDKLIREVKVITLKSKLVSDFRKDFQFYKVREINNYHHAHDAYLNAVVGTALIKKYPKLESEFVYGDYKVYDVRKMIAKSEQEIGKATAKYFFYSNIMNFFKTEITLANGEIRKRPLIETNGETGEIVWDKGRDFATVRKVLSMPQVNIVKKTEVQTGGFSKESILPKRNSDKLIARKKDWDPKKYGGFDSPTVAYSVLVVAKVEKGKSKKLKSVKELLGITIMERSSFEKNPIDFLEAKGYKEVKKDLIIKLPKYSLFELENGRKRMLASAGELQKGNELALPSKYVNFLYLASHYEKLKGSPEDNEQKQLFVEQHKHYLDEIIEQISEFSKRVILADANLDKVLSAYNKHRDKPIREQAENIIHLFTLTNLGAPAAFKYFDTTIDRKRYTSTKEVLDATLIHQSITGLYETRIDLSQLGGDGGPAPGSSGGSGGVLNLEEEYRLHEKPVPSSIDPSWLQLFPTVWAERAGMGLANQVPPVVVELRSGASPVAVRQYPMSKEAREGIRPHIQRFLDLGVLVPCQSPWNTPLLPVKKPGTNDYRPVQDLREINKRVQDIHPTVPNPYNLLSSLPPSHTWYSVLDLKDAFFCLKLHPNSQPLFAFEWRDPEKGNTGQLTWTRLPQGFKNSPTLFNEALHRDLAPFRALNPQVVLLQYVDDLLVAAPTYRDCKEGTQKLLQELSKLGYRVSAKKAQLCQKEVTYLGYLLKEGKRWLTPARKATVMKIPPPTTPRQVREFLGTAGFCRLWIPGFASLAAPLYPLTKPSIPFIWTEEHQKAFDRIKEALLSAPALALPDLTKPFTLYVDERAGVARGVLTQTLGPWRRPVAYLSKKLDPVASGWPTCLKAVAAVALLLKDADKLTLGQNVTVIASHSLESIVRQPPDRWMTNARMTHYQSLLLNERVSFAPPAVLNPATLLPVESEATPVHRCSEILAEETGTRRDLKDQPLPGVPAWYTDGSSFIAEGKRRAGAAIVDGKRTVWASSLPEGTSAQKAELVALTQALRLAEGKDINIYTDSRYAFATAHIHGAIYKQRGWLTSAGKDIKNKEEILALLEAIHLPKRVAIIHCPGHQKGNDPVATGNRRADEAAKQAALSTRVLAETTKPAGKRTADGSEFEKRTADGSEFESPKKKAKVE

SEQ ID NO: 7192 - protein, 2092 aa, synthetic construct
MPAAKRVKLDGGDKKYSIGLDIGTNSVGWAVITDEYKVPSKKFKVLGNTDRHSIKKNLIGALLFDSGETAEATRLKRTARRRYTRRKNRICYLQEIFSNEMAKVDDSFFHRLEESFLVEEDKKHERHPIFGNIVDEVAYHEKYPTIYHLRKKLVDSTDKADLRLIYLALAHMIKFRGHFLIEGDLNPDNSDVDKLFIQLVQTYNQLFEENPINASGVDAKAILSARLSKSRRLENLIAQLPGEKKNGLFGNLIALSLGLTPNFKSNFDLAEDAKLQLSKDTYDDDLDNLLAQIGDQYADLFLAAKNLSDAILLSDILRVNTEITKAPLSASMIKRYDEHHQDLTLLKALVRQQLPEKYKEIFFDQSKNGYAGYIDGGASQEEFYKFIKPILEKMDGTEELLVKLNREDLLRKQRTFDNGSIPHQIHLGELHAILRRQEDFYPFLKDNREKIEKILTFRIPYYVGPLARGNSRFAWMTRKSEETITPWNFEEVVDKGASAQSFIERMTNFDKNLPNEKVLPKHSLLYEYFTVYNELTKVKYVTEGMRKPAFLSGEQKKAIVDLLFKTNRKVTVKQLKEDYFKKIECFDSVEISGVEDRFNASLGTYHDLLKIIKDKDFLDNEENEDILEDIVLTLTLFEDREMIEERLKTYAHLFDDKVMKQLKRRRYTGWGRLSRKLINGIRDKQSGKTILDFLKSDGFANRNFMQLIHDDSLTFKEDIQKAQVSGQGDSLHEHIANLAGSPAIKKGILQTVKVVDELVKVMGRHKPENIVIEMARENQTTQKGQKNSRERMKRIEEGIKELGSQILKEHPVENTQLQNEKLYLYYLQNGRDMYVDQELDINRLSDYDVDHIVPQSFLKDDSIDNKVLTRSDKARGKSDNVPSEEVVKKMKNYWRQLLNAKLITQRKFDNLTKAERGGLSELDKAGFIKRQLVETRQITKHVAQILDSRMNTKYDENDKLIREVKVITLKSKLVSDFRKDFQFYKVREINNYHHAHDAYLNAVVGTALIKKYPKLESEFVYGDYKVYDVRKMIAKSEQEIGKATAKYFFYSNIMNFFKTEITLANGEIRKRPLIETNGETGEIVWDKGRDFATVRKVLSMPQVNIVKKTEVQTGGFSKESILPKRNSDKLIARKKDWDPKKYGGFDSPTVAYSVLVVAKVEKGKSKKLKSVKELLGITIMERSSFEKNPIDFLEAKGYKEVKKDLIIKLPKYSLFELENGRKRMLASAGELQKGNELALPSKYVNFLYLASHYEKLKGSPEDNEQKQLFVEQHKHYLDEIIEQISEFSKRVILADANLDKVLSAYNKHRDKPIREQAENIIHLFTLTNLGAPAAFKYFDTTIDRKRYTSTKEVLDATLIHQSITGLYETRIDLSQLGGDGGPAPGSSGGSGGVLNLEEEYRLHEKPVPSSIDPSWLQLFPTVWAERAGMGLANQVPPVVVELRSGASPVAVRQYPMSKEAREGIRPHIQRFLDLGVLVPCQSPWNTPLLPVKKPGTNDYRPVQDLREINKRVQDIHPTVPNPYNLLSSLPPSHTWYSVLDLKDAFFCLKLHPNSQPLFAFEWRDPEKGNTGQLTWTRLPQGFKNSPTLFNEALHRDLAPFRALNPQVVLLQYVDDLLVAAPTYRDCKEGTQKLLQELSKLGYRVSAKKAQLCQKEVTYLGYLLKEGKRWLTPARKATVMKIPPPTTPRQVREFLGKAGFCRLFIPGFASLAAPLYPLTKPSIPFIWTEEHQKAFDRIKEALLSAPALALPDLTKPFTLYVDERAGVARGVLTQTLGPWRRPVAYLSKKLDPVASGWPTCLKAVAAVALLLKDADKLTLGQNVTVIASHSLESIVRQPPDRWMTNARMTHYQSLLLNERVSFAPPAVLNPATLLPVESEATPVHRCSEILAEETGTRRDLKDQPLPGVPAWYTDGSSFIAEGKRRAGAAIVDGKRTVWASSLPEGTSAQKAELVALTQALRLAEGKDINIYTDSRYAFATAHIHGAIYKQRGWLTSAGKDIKNKEEILALLEAIHLPKRVAIIHCPGHQKGNDPVATGNRRADEAAKQAALSTRVLAETTKPAGKRTADGSEFEKRTADGSEFESPKKKAKVE

SEQ ID NO: 7193 - protein, 2095 aa, synthetic construct
MPAAKRVKLDGGDKKYSIGLDIGTNSVGWAVITDEYKVPSKKFKVLGNTDRHSIKKNLIGALLFDSGETAEATRLKRTARRRYTRRKNRICYLQEIFSNEMAKVDDSFFHRLEESFLVEEDKKHERHPIFGNIVDEVAYHEKYPTIYHLRKKLVDSTDKADLRLIYLALAHMIKFRGHFLIEGDLNPDNSDVDKLFIQLVQTYNQLFEENPINASGVDAKAILSARLSKSRRLENLIAQLPGEKKNGLFGNLIALSLGLTPNFKSNFDLAEDAKLQLSKDTYDDDLDNLLAQIGDQYADLFLAAKNLSDAILLSDILRVNTEITKAPLSASMIKRYDEHHQDLTLLKALVRQQLPEKYKEIFFDQSKNGYAGYIDGGASQEEFYKFIKPILEKMDGTEELLVKLNREDLLRKQRTFDNGSIPHQIHLGELHAILRRQEDFYPFLKDNREKIEKILTFRIPYYVGPLARGNSRFAWMTRKSEETITPWNFEEVVDKGASAQSFIERMTNFDKNLPNEKVLPKHSLLYEYFTVYNELTKVKYVTEGMRKPAFLSGEQKKAIVDLLFKTNRKVTVKQLKEDYFKKIECFDSVEISGVEDRFNASLGTYHDLLKIIKDKDFLDNEENEDILEDIVLTLTLFEDREMIEERLKTYAHLFDDKVMKQLKRRRYTGWGRLSRKLINGIRDKQSGKTILDFLKSDGFANRNFMQLIHDDSLTFKEDIQKAQVSGQGDSLHEHIANLAGSPAIKKGILQTVKVVDELVKVMGRHKPENIVIEMARENQTTQKGQKNSRERMKRIEEGIKELGSQILKEHPVENTQLQNEKLYLYYLQNGRDMYVDQELDINRLSDYDVDHIVPQSFLKDDSIDNKVLTRSDKARGKSDNVPSEEVVKKMKNYWRQLLNAKLITQRKFDNLTKAERGGLSELDKAGFIKRQLVETRQITKHVAQILDSRMNTKYDENDKLIREVKVITLKSKLVSDFRKDFQFYKVREINNYHHAHDAYLNAVVGTALIKKYPKLESEFVYGDYKVYDVRKMIAKSEQEIGKATAKYFFYSNIMNFFKTEITLANGEIRKRPLIETNGETGEIVWDKGRDFATVRKVLSMPQVNIVKKTEVQTGGFSKESILPKRNSDKLIARKKDWDPKKYGGFDSPTVAYSVLVVAKVEKGKSKKLKSVKELLGITIMERSSFEKNPIDFLEAKGYKEVKKDLIIKLPKYSLFELENGRKRMLASAGELQKGNELALPSKYVNFLYLASHYEKLKGSPEDNEQKQLFVEQHKHYLDEIIEQISEFSKRVILADANLDKVLSAYNKHRDKPIREQAENIIHLFTLTNLGAPAAFKYFDTTIDRKRYTSTKEVLDATLIHQSITGLYETRIDLSQLGGDGGGGSEAAAKPAPGGTLQLEEEYRLFEPESTQKQEMDIWLKNFPQAWAETGGMGTAHCQAPVLIQLKATATPISIRQYPMPHEAYQGIKPHIRRMLDQGILKPCQSPWNTPLLPVKKPGTEDYRPVQDLREVNKRVEDIHPTVPNPYNLLSTLPPSHPWYTVLDLKDAFFCLRLHSESQLLFAFEWRDPEIGLSGQLTWTRLPQGFKNSPTLFNEALHSDLADFRVRYPALVLLQYVDDLLLAAATRTECLEGTKALLETLGNKGYRASAKKAQICLQEVTYLGYSLKDGQRWLTKARKEAILSIPVPKNSRQVREFLGTAGYCRLWIPGFAELAAPLYPLTRPGTLFQWGTEQQLAFEDIKKALLSSPALGLPDITKPFELFIDENSGFAKGVLVQKLGPWKRPVAYLSKKLDTVASGWPPCLRMVAAIAILVKDAGKLTLGQPLTILTSHPVEALVRQPPNKWLSNARMTHYQAMLLDAERVHFGPTVSLNPATLLPLPSGGNHHDCLQILAETHGTRPDLTDQPLPDADLTWYTDGSSFIRNGEREAGAAVTTESEVIWAAPLPPGTSAQRAELIALTQALKMAEGKKLTVYTDSRYAFATTHVHGEIYRRRGWLTSEGKEIKNKNEILALLEALFLPKRLSIIHCPGHQKGDSPQAKGNRLADDTAKKAATETHSSLTVLPAGKRTADGSEFEKRTADGSEFESPKKKAKVE

SEQ ID NO: 7194 - protein, 2095 aa, synthetic construct
MPAAKRVKLDGGDKKYSIGLDIGTNSVGWAVITDEYKVPSKKFKVLGNTDRHSIKKNLIGALLFDSGETAEATRLKRTARRRYTRRKNRICYLQEIFSNEMAKVDDSFFHRLEESFLVEEDKKHERHPIFGNIVDEVAYHEKYPTIYHLRKKLVDSTDKADLRLIYLALAHMIKFRGHFLIEGDLNPDNSDVDKLFIQLVQTYNQLFEENPINASGVDAKAILSARLSKSRRLENLIAQLPGEKKNGLFGNLIALSLGLTPNFKSNFDLAEDAKLQLSKDTYDDDLDNLLAQIGDQYADLFLAAKNLSDAILLSDILRVNTEITKAPLSASMIKRYDEHHQDLTLLKALVRQQLPEKYKEIFFDQSKNGYAGYIDGGASQEEFYKFIKPILEKMDGTEELLVKLNREDLLRKQRTFDNGSIPHQIHLGELHAILRRQEDFYPFLKDNREKIEKILTFRIPYYVGPLARGNSRFAWMTRKSEETITPWNFEEVVDKGASAQSFIERMTNFDKNLPNEKVLPKHSLLYEYFTVYNELTKVKYVTEGMRKPAFLSGEQKKAIVDLLFKTNRKVTVKQLKEDYFKKIECFDSVEISGVEDRFNASLGTYHDLLKIIKDKDFLDNEENEDILEDIVLTLTLFEDREMIEERLKTYAHLFDDKVMKQLKRRRYTGWGRLSRKLINGIRDKQSGKTILDFLKSDGFANRNFMQLIHDDSLTFKEDIQKAQVSGQGDSLHEHIANLAGSPAIKKGILQTVKVVDELVKVMGRHKPENIVIEMARENQTTQKGQKNSRERMKRIEEGIKELGSQILKEHPVENTQLQNEKLYLYYLQNGRDMYVDQELDINRLSDYDVDHIVPQSFLKDDSIDNKVLTRSDKARGKSDNVPSEEVVKKMKNYWRQLLNAKLITQRKFDNLTKAERGGLSELDKAGFIKRQLVETRQITKHVAQILDSRMNTKYDENDKLIREVKVITLKSKLVSDFRKDFQFYKVREINNYHHAHDAYLNAVVGTALIKKYPKLESEFVYGDYKVYDVRKMIAKSEQEIGKATAKYFFYSNIMNFFKTEITLANGEIRKRPLIETNGETGEIVWDKGRDFATVRKVLSMPQVNIVKKTEVQTGGFSKESILPKRNSDKLIARKKDWDPKKYGGFDSPTVAYSVLVVAKVEKGKSKKLKSVKELLGITIMERSSFEKNPIDFLEAKGYKEVKKDLIIKLPKYSLFELENGRKRMLASAGELQKGNELALPSKYVNFLYLASHYEKLKGSPEDNEQKQLFVEQHKHYLDEIIEQISEFSKRVILADANLDKVLSAYNKHRDKPIREQAENIIHLFTLTNLGAPAAFKYFDTTIDRKRYTSTKEVLDATLIHQSITGLYETRIDLSQLGGDGGGGSEAAAKPAPGGTLQLEEEYRLFEPESTQKQEMDIWLKNFPQAWAETGGMGTAHCQAPVLIQLKATATPISIRQYPMPHEAYQGIKPHIRRMLDQGILKPCQSPWNTPLLPVKKPGTEDYRPVQDLREVNKRVEDIHPTVPNPYNLLSTLPPSHPWYTVLDLKDAFFCLRLHSESQLLFAFEWRDPEIGLSGQLTWTRLPQGFKNSPTLFNEALHSDLADFRVRYPALVLLQYVDDLLLAAATRTECLEGTKALLETLGNKGYRASAKKAQICLQEVTYLGYSLKDGQRWLTKARKEAILSIPVPKNSRQVREFLGKAGYCRLFIPGFAELAAPLYPLTRPGTLFQWGTEQQLAFEDIKKALLSSPALGLPDITKPFELFIDENSGFAKGVLVQKLGPWKRPVAYLSKKLDTVASGWPPCLRMVAAIAILVKDAGKLTLGQPLTILTSHPVEALVRQPPNKWLSNARMTHYQAMLLDAERVHFGPTVSLNPATLLPLPSGGNHHDCLQILAETHGTRPDLTDQPLPDADLTWYTDGSSFIRNGEREAGAAVTTESEVIWAAPLPPGTSAQRAELIALTQALKMAEGKKLTVYTDSRYAFATTHVHGEIYRRRGWLTSEGKEIKNKNEILALLEALFLPKRLSIIHCPGHQKGDSPQAKGNRLADDTAKKAATETHSSLTVLPAGKRTADGSEFEKRTADGSEFESPKKKAKVE

SEQ ID NO: 7195 - protein, 2176 aa, synthetic construct
MPAAKRVKLDGGDKKYSIGLDIGTNSVGWAVITDEYKVPSKKFKVLGNTDRHSIKKNLIGALLFDSGETAEATRLKRTARRRYTRRKNRICYLQEIFSNEMAKVDDSFFHRLEESFLVEEDKKHERHPIFGNIVDEVAYHEKYPTIYHLRKKLVDSTDKADLRLIYLALAHMIKFRGHFLIEGDLNPDNSDVDKLFIQLVQTYNQLFEENPINASGVDAKAILSARLSKSRRLENLIAQLPGEKKNGLFGNLIALSLGLTPNFKSNFDLAEDAKLQLSKDTYDDDLDNLLAQIGDQYADLFLAAKNLSDAILLSDILRVNTEITKAPLSASMIKRYDEHHQDLTLLKALVRQQLPEKYKEIFFDQSKNGYAGYIDGGASQEEFYKFIKPILEKMDGTEELLVKLNREDLLRKQRTFDNGSIPHQIHLGELHAILRRQEDFYPFLKDNREKIEKILTFRIPYYVGPLARGNSRFAWMTRKSEETITPWNFEEVVDKGASAQSFIERMTNFDKNLPNEKVLPKHSLLYEYFTVYNELTKVKYVTEGMRKPAFLSGEQKKAIVDLLFKTNRKVTVKQLKEDYFKKIECFDSVEISGVEDRFNASLGTYHDLLKIIKDKDFLDNEENEDILEDIVLTLTLFEDREMIEERLKTYAHLFDDKVMKQLKRRRYTGWGRLSRKLINGIRDKQSGKTILDFLKSDGFANRNFMQLIHDDSLTFKEDIQKAQVSGQGDSLHEHIANLAGSPAIKKGILQTVKVVDELVKVMGRHKPENIVIEMARENQTTQKGQKNSRERMKRIEEGIKELGSQILKEHPVENTQLQNEKLYLYYLQNGRDMYVDQELDINRLSDYDVDHIVPQSFLKDDSIDNKVLTRSDKARGKSDNVPSEEVVKKMKNYWRQLLNAKLITQRKFDNLTKAERGGLSELDKAGFIKRQLVETRQITKHVAQILDSRMNTKYDENDKLIREVKVITLKSKLVSDFRKDFQFYKVREINNYHHAHDAYLNAVVGTALIKKYPKLESEFVYGDYKVYDVRKMIAKSEQEIGKATAKYFFYSNIMNFFKTEITLANGEIRKRPLIETNGETGEIVWDKGRDFATVRKVLSMPQVNIVKKTEVQTGGFSKESILPKRNSDKLIARKKDWDPKKYGGFDSPTVAYSVLVVAKVEKGKSKKLKSVKELLGITIMERSSFEKNPIDFLEAKGYKEVKKDLIIKLPKYSLFELENGRKRMLASAGELQKGNELALPSKYVNFLYLASHYEKLKGSPEDNEQKQLFVEQHKHYLDEIIEQISEFSKRVILADANLDKVLSAYNKHRDKPIREQAENIIHLFTLTNLGAPAAFKYFDTTIDRKRYTSTKEVLDATLIHQSITGLYETRIDLSQLGGDGGGGSEAAAKPAPGGMNPLQLLQPLPAEIKGTKLLAHWNSGATITCIPESFLEDEQPIKKTLIKTIHGEKQQNVYYVTFKVKGRKVEAEVIASPYEYILLSPTDVPWLTQQPLQLTILVPLQEYQEKILSKTALPEDQKQQLKTLFVKYDNLWQHWENQVGHRKIRPHNIATGDYPPRPQKQYPINPKAKPSIQIVIDDLLKQGVLTPQNSTMNTPVYPVPKPDGRWRMVLDYREVNKTIPLTAAQNQHSAGILATIVRQKYKTTLDLANGFWAHPITPESYWLTAFTWQGKQYCWTRLPQGFLNSPALFNADVVDLLKEIPNVQVYVDDIYLSHDDPKEHVQQLEKVFQILLQAGYVVSLKKSEIGQKTVEFLGFNITKEGRGLTDTFKTKLLNITPPKDLKQLQSILGKLNFARNFIPNFAELVQPLYNLIAPAKGKYIEWSEENTKQLNMVIEALNTASNLEERLPEQRLVIKVNTSPSAGYVRYYNETGKKPIMYLNYVFSKAELKFSMLEKLLTTMHKALIKAMDLAMGQEILVYSPIVSMTKIQKTPLPERKALPIRWITWMTYLEDPRIQFHYDKTLPELKHIPDVYTSSQSPVKHPSQYEGVFYTDGSAIKSPDPTKSNNAGMGIVHATYKPEYQVLNQWSIPLGNHTAQMAEIAAVEFACKKALKIPGPVLVITDSFYVAESANKELPYWKSNGFVNNKKKPLKHISKWKSIAECLSMKPDITIQHEKGISLQIPVFILKGNALADKLATQGSYVVNAGKRTADGSEFEKRTADGSEFESPKKKAKVE

SEQ ID NO: 7196 - protein, 2218 aa, synthetic construct
MPAAKRVKLDGGDKKYSIGLDIGTNSVGWAVITDEYKVPSKKFKVLGNTDRHSIKKNLIGALLFDSGETAEATRLKRTARRRYTRRKNRICYLQEIFSNEMAKVDDSFFHRLEESFLVEEDKKHERHPIFGNIVDEVAYHEKYPTIYHLRKKLVDSTDKADLRLIYLALAHMIKFRGHFLIEGDLNPDNSDVDKLFIQLVQTYNQLFEENPINASGVDAKAILSARLSKSRRLENLIAQLPGEKKNGLFGNLIALSLGLTPNFKSNFDLAEDAKLQLSKDTYDDDLDNLLAQIGDQYADLFLAAKNLSDAILLSDILRVNTEITKAPLSASMIKRYDEHHQDLTLLKALVRQQLPEKYKEIFFDQSKNGYAGYIDGGASQEEFYKFIKPILEKMDGTEELLVKLNREDLLRKQRTFDNGSIPHQIHLGELHAILRRQEDFYPFLKDNREKIEKILTFRIPYYVGPLARGNSRFAWMTRKSEETITPWNFEEVVDKGASAQSFIERMTNFDKNLPNEKVLPKHSLLYEYFTVYNELTKVKYVTEGMRKPAFLSGEQKKAIVDLLFKTNRKVTVKQLKEDYFKKIECFDSVEISGVEDRFNASLGTYHDLLKIIKDKDFLDNEENEDILEDIVLTLTLFEDREMIEERLKTYAHLFDDKVMKQLKRRRYTGWGRLSRKLINGIRDKQSGKTILDFLKSDGFANRNFMQLIHDDSLTFKEDIQKAQVSGQGDSLHEHIANLAGSPAIKKGILQTVKVVDELVKVMGRHKPENIVIEMARENQTTQKGQKNSRERMKRIEEGIKELGSQILKEHPVENTQLQNEKLYLYYLQNGRDMYVDQELDINRLSDYDVDHIVPQSFLKDDSIDNKVLTRSDKARGKSDNVPSEEVVKKMKNYWRQLLNAKLITQRKFDNLTKAERGGLSELDKAGFIKRQLVETRQITKHVAQILDSRMNTKYDENDKLIREVKVITLKSKLVSDFRKDFQFYKVREINNYHHAHDAYLNAVVGTALIKKYPKLESEFVYGDYKVYDVRKMIAKSEQEIGKATAKYFFYSNIMNFFKTEITLANGEIRKRPLIETNGETGEIVWDKGRDFATVRKVLSMPQVNIVKKTEVQTGGFSKESILPKRNSDKLIARKKDWDPKKYGGFDSPTVAYSVLVVAKVEKGKSKKLKSVKELLGITIMERSSFEKNPIDFLEAKGYKEVKKDLIIKLPKYSLFELENGRKRMLASAGELQKGNELALPSKYVNFLYLASHYEKLKGSPEDNEQKQLFVEQHKHYLDEIIEQISEFSKRVILADANLDKVLSAYNKHRDKPIREQAENIIHLFTLTNLGAPAAFKYFDTTIDRKRYTSTKEVLDATLIHQSITGLYETRIDLSQLGGDGGGGSEAAAKPAPGGTLGDQGSRGSDPLPEPRVTLTVEGIPTEFLVNTGAEHSVLTKPMGKMGSKRTVVAGATGSKVYPWTTKRLLKIGQKQVTHSFLVIPECPAPLLGRDLLTKLKAQIQFSTEGPQVTWEDRPAMCLVLNLEEEYRLHEKPVPPSIDPSWLQLFPMVWAEKAGMGLANQVPPVVVELKSDASPVAVRQYPMSKEAREGIRPHIQRFLDLGILVPCQSPWNTPLLPVKKPGTNDYRPVQDLREVNKRVQDIHPTVPNPYNLLSSLPPSHTWYSVLDLKDAFFCLKLHPNSQPLFAFEWRDPEKGNTGQLTWTRLPQGFKNSPTLFNEALHRDLASFRALNPQVVMLQYVDDLLVAAPTYRDCKEGTRRLLQELSKLGYRVSAKKAQLCREEVTYLGYLLKGGKRWLTPARKATVMKIPTPTTPRQVREFLGTAGFCRLWIPGFASLAAPLYPLTRPKVPFTWTEAHQEAFGRIKEALLSAPALALPDLTKPFALYVDEKEGVARGVLTQTLGPWRRPVAYLSKKLDPVASGWPTCLKAIAAVALLLKDADKLTLGQNVLVIAPHNLESIVRQPPDRWMTNARMTHYQSLLLNERVSFAPPAILNPATLLPVESDDTPIHICSEILAEETGTRPDLRDQPLPGVPAWYTDGSSFIMDGRRQAGAAIVDNKRTVWASNLPEGTSAQKAELIALTQALRLAEGKSINIYTDSRYAFATAHVHGAIYKQRGWLTSAGKDIKNKEEILALLEAIHLPKRVAIIHCPGHQRGTDPVATGNRKADEAAKQAAQSTRILTETTKNAGKRTADGSEFEKRTADGSEFESPKKKAKVE

SEQ ID NO: 7197 - protein, 2218 aa, synthetic construct
MPAAKRVKLDGGDKKYSIGLDIGTNSVGWAVITDEYKVPSKKFKVLGNTDRHSIKKNLIGALLFDSGETAEATRLKRTARRRYTRRKNRICYLQEIFSNEMAKVDDSFFHRLEESFLVEEDKKHERHPIFGNIVDEVAYHEKYPTIYHLRKKLVDSTDKADLRLIYLALAHMIKFRGHFLIEGDLNPDNSDVDKLFIQLVQTYNQLFEENPINASGVDAKAILSARLSKSRRLENLIAQLPGEKKNGLFGNLIALSLGLTPNFKSNFDLAEDAKLQLSKDTYDDDLDNLLAQIGDQYADLFLAAKNLSDAILLSDILRVNTEITKAPLSASMIKRYDEHHQDLTLLKALVRQQLPEKYKEIFFDQSKNGYAGYIDGGASQEEFYKFIKPILEKMDGTEELLVKLNREDLLRKQRTFDNGSIPHQIHLGELHAILRRQEDFYPFLKDNREKIEKILTFRIPYYVGPLARGNSRFAWMTRKSEETITPWNFEEVVDKGASAQSFIERMTNFDKNLPNEKVLPKHSLLYEYFTVYNELTKVKYVTEGMRKPAFLSGEQKKAIVDLLFKTNRKVTVKQLKEDYFKKIECFDSVEISGVEDRFNASLGTYHDLLKIIKDKDFLDNEENEDILEDIVLTLTLFEDREMIEERLKTYAHLFDDKVMKQLKRRRYTGWGRLSRKLINGIRDKQSGKTILDFLKSDGFANRNFMQLIHDDSLTFKEDIQKAQVSGQGDSLHEHIANLAGSPAIKKGILQTVKVVDELVKVMGRHKPENIVIEMARENQTTQKGQKNSRERMKRIEEGIKELGSQILKEHPVENTQLQNEKLYLYYLQNGRDMYVDQELDINRLSDYDVDHIVPQSFLKDDSIDNKVLTRSDKARGKSDNVPSEEVVKKMKNYWRQLLNAKLITQRKFDNLTKAERGGLSELDKAGFIKRQLVETRQITKHVAQILDSRMNTKYDENDKLIREVKVITLKSKLVSDFRKDFQFYKVREINNYHHAHDAYLNAVVGTALIKKYPKLESEFVYGDYKVYDVRKMIAKSEQEIGKATAKYFFYSNIMNFFKTEITLANGEIRKRPLIETNGETGEIVWDKGRDFATVRKVLSMPQVNIVKKTEVQTGGFSKESILPKRNSDKLIARKKDWDPKKYGGFDSPTVAYSVLVVAKVEKGKSKKLKSVKELLGITIMERSSFEKNPIDFLEAKGYKEVKKDLIIKLPKYSLFELENGRKRMLASAGELQKGNELALPSKYVNFLYLASHYEKLKGSPEDNEQKQLFVEQHKHYLDEIIEQISEFSKRVILADANLDKVLSAYNKHRDKPIREQAENIIHLFTLTNLGAPAAFKYFDTTIDRKRYTSTKEVLDATLIHQSITGLYETRIDLSQLGGDGGGGSEAAAKPAPGGTLGDQGSRGSDPLPEPRVTLTVEGIPTEFLVNTGAEHSVLTKPMGKMGSKRTVVAGATGSKVYPWTTKRLLKIGQKQVTHSFLVIPECPAPLLGRDLLTKLKAQIQFSTEGPQVTWEDRPAMCLVLNLEEEYRLHEKPVPPSIDPSWLQLFPMVWAEKAGMGLANQVPPVVVELKSDASPVAVRQYPMSKEAREGIRPHIQRFLDLGILVPCQSPWNTPLLPVKKPGTNDYRPVQDLREVNKRVQDIHPTVPNPYNLLSSLPPSHTWYSVLDLKDAFFCLKLHPNSQPLFAFEWRDPEKGNTGQLTWTRLPQGFKNSPTLFNEALHRDLASFRALNPQVVMLQYVDDLLVAAPTYRDCKEGTRRLLQELSKLGYRVSAKKAQLCREEVTYLGYLLKGGKRWLTPARKATVMKIPTPTTPRQVREFLGKAGFCRLFIPGFASLAAPLYPLTRPKVPFTWTEAHQEAFGRIKEALLSAPALALPDLTKPFALYVDEKEGVARGVLTQTLGPWRRPVAYLSKKLDPVASGWPTCLKAIAAVALLLKDADKLTLGQNVLVIAPHNLESIVRQPPDRWMTNARMTHYQSLLLNERVSFAPPAILNPATLLPVESDDTPIHICSEILAEETGTRPDLRDQPLPGVPAWYTDGSSFIMDGRRQAGAAIVDNKRTVWASNLPEGTSAQKAELIALTQALRLAEGKSINIYTDSRYAFATAHVHGAIYKQRGWLTSAGKDIKNKEEILALLEAIHLPKRVAIIHCPGHQRGTDPVATGNRKADEAAKQAAQSTRILTETTKNAGKRTADGSEFEKRTADGSEFESPKKKAKVE

SEQ ID NO: 7198 - protein, 2096 aa, synthetic construct
MPAAKRVKLDGGDKKYSIGLDIGTNSVGWAVITDEYKVPSKKFKVLGNTDRHSIKKNLIGALLFDSGETAEATRLKRTARRRYTRRKNRICYLQEIFSNEMAKVDDSFFHRLEESFLVEEDKKHERHPIFGNIVDEVAYHEKYPTIYHLRKKLVDSTDKADLRLIYLALAHMIKFRGHFLIEGDLNPDNSDVDKLFIQLVQTYNQLFEENPINASGVDAKAILSARLSKSRRLENLIAQLPGEKKNGLFGNLIALSLGLTPNFKSNFDLAEDAKLQLSKDTYDDDLDNLLAQIGDQYADLFLAAKNLSDAILLSDILRVNTEITKAPLSASMIKRYDEHHQDLTLLKALVRQQLPEKYKEIFFDQSKNGYAGYIDGGASQEEFYKFIKPILEKMDGTEELLVKLNREDLLRKQRTFDNGSIPHQIHLGELHAILRRQEDFYPFLKDNREKIEKILTFRIPYYVGPLARGNSRFAWMTRKSEETITPWNFEEVVDKGASAQSFIERMTNFDKNLPNEKVLPKHSLLYEYFTVYNELTKVKYVTEGMRKPAFLSGEQKKAIVDLLFKTNRKVTVKQLKEDYFKKIECFDSVEISGVEDRFNASLGTYHDLLKIIKDKDFLDNEENEDILEDIVLTLTLFEDREMIEERLKTYAHLFDDKVMKQLKRRRYTGWGRLSRKLINGIRDKQSGKTILDFLKSDGFANRNFMQLIHDDSLTFKEDIQKAQVSGQGDSLHEHIANLAGSPAIKKGILQTVKVVDELVKVMGRHKPENIVIEMARENQTTQKGQKNSRERMKRIEEGIKELGSQILKEHPVENTQLQNEKLYLYYLQNGRDMYVDQELDINRLSDYDVDHIVPQSFLKDDSIDNKVLTRSDKARGKSDNVPSEEVVKKMKNYWRQLLNAKLITQRKFDNLTKAERGGLSELDKAGFIKRQLVETRQITKHVAQILDSRMNTKYDENDKLIREVKVITLKSKLVSDFRKDFQFYKVREINNYHHAHDAYLNAVVGTALIKKYPKLESEFVYGDYKVYDVRKMIAKSEQEIGKATAKYFFYSNIMNFFKTEITLANGEIRKRPLIETNGETGEIVWDKGRDFATVRKVLSMPQVNIVKKTEVQTGGFSKESILPKRNSDKLIARKKDWDPKKYGGFDSPTVAYSVLVVAKVEKGKSKKLKSVKELLGITIMERSSFEKNPIDFLEAKGYKEVKKDLIIKLPKYSLFELENGRKRMLASAGELQKGNELALPSKYVNFLYLASHYEKLKGSPEDNEQKQLFVEQHKHYLDEIIEQISEFSKRVILADANLDKVLSAYNKHRDKPIREQAENIIHLFTLTNLGAPAAFKYFDTTIDRKRYTSTKEVLDATLIHQSITGLYETRIDLSQLGGDGGGGSEAAAKPAPGGTLNLEDEYRLYETSAEPEVSPGSTWLSDFPQAWAETGGMGLAVRQAPLIIPLKATSTPVSIKQYPMSQEAKLGIKPHIQRLLDQGILVPCQSPWNTPLLPVKKPGTNDYRPVQDLREVNKRVEDIHPTVPNPYNLLSGLPPSHRWYTVLDLKDAFFCLRLHPTSQPLFAFEWRDPGMGISGQLTWTRLPQGFKNSPTLFNEALHRDLADFRIQHPDLILLQYVDDILLAATSELDCQQGTRALLLTLGNLGYRASAKKAQLCQKQVKYLGYLLKEGQRWLTEARKETVMGQPTPKTPRQLREFLGKAGFCRLFIPGFAEMAAPLYPLTKPGTLFNWGPDQQKAYQEIKQALLTAPALGLPDLTKPFELFVDEKQGYAKGVLTQKLGPWRRPVAYLSKKLDPVAAGWPPCLRMVAAIAVLRKDAGKLTMGQPLVILAPHAVEALVKQPPDRWLSNARMTHYQAMLLDTDRVQFGPVVALNPATLLPLPEEGAPHDCLEILAETHGTRPDLTDQPIPDADHTWYTDGSSFLQEGQRKAGAAVTTETEVIWARALPAGTSAQRAELIALTQALKMAEGKRLNVYTDSRYAFATAHIHGEIYRRRGWLTSEGREIKNKSEILALLKALFLPKRLSIIHCLGHQKGDSAEARGNRLADQAAREAAIKTPPDTSTLLAGKRTADGSEFEKRTADGSEFESPKKKAKVE

SEQ ID NO: 7199 - protein, 2096 aa, synthetic construct
MPAAKRVKLDGGDKKYSIGLDIGTNSVGWAVITDEYKVPSKKFKVLGNTDRHSIKKNLIGALLFDSGETAEATRLKRTARRRYTRRKNRICYLQEIFSNEMAKVDDSFFHRLEESFLVEEDKKHERHPIFGNIVDEVAYHEKYPTIYHLRKKLVDSTDKADLRLIYLALAHMIKFRGHFLIEGDLNPDNSDVDKLFIQLVQTYNQLFEENPINASGVDAKAILSARLSKSRRLENLIAQLPGEKKNGLFGNLIALSLGLTPNFKSNFDLAEDAKLQLSKDTYDDDLDNLLAQIGDQYADLFLAAKNLSDAILLSDILRVNTEITKAPLSASMIKRYDEHHQDLTLLKALVRQQLPEKYKEIFFDQSKNGYAGYIDGGASQEEFYKFIKPILEKMDGTEELLVKLNREDLLRKQRTFDNGSIPHQIHLGELHAILRRQEDFYPFLKDNREKIEKILTFRIPYYVGPLARGNSRFAWMTRKSEETITPWNFEEVVDKGASAQSFIERMTNFDKNLPNEKVLPKHSLLYEYFTVYNELTKVKYVTEGMRKPAFLSGEQKKAIVDLLFKTNRKVTVKQLKEDYFKKIECFDSVEISGVEDRFNASLGTYHDLLKIIKDKDFLDNEENEDILEDIVLTLTLFEDREMIEERLKTYAHLFDDKVMKQLKRRRYTGWGRLSRKLINGIRDKQSGKTILDFLKSDGFANRNFMQLIHDDSLTFKEDIQKAQVSGQGDSLHEHIANLAGSPAIKKGILQTVKVVDELVKVMGRHKPENIVIEMARENQTTQKGQKNSRERMKRIEEGIKELGSQILKEHPVENTQLQNEKLYLYYLQNGRDMYVDQELDINRLSDYDVDHIVPQSFLKDDSIDNKVLTRSDKARGKSDNVPSEEVVKKMKNYWRQLLNAKLITQRKFDNLTKAERGGLSELDKAGFIKRQLVETRQITKHVAQILDSRMNTKYDENDKLIREVKVITLKSKLVSDFRKDFQFYKVREINNYHHAHDAYLNAVVGTALIKKYPKLESEFVYGDYKVYDVRKMIAKSEQEIGKATAKYFFYSNIMNFFKTEITLANGEIRKRPLIETNGETGEIVWDKGRDFATVRKVLSMPQVNIVKKTEVQTGGFSKESILPKRNSDKLIARKKDWDPKKYGGFDSPTVAYSVLVVAKVEKGKSKKLKSVKELLGITIMERSSFEKNPIDFLEAKGYKEVKKDLIIKLPKYSLFELENGRKRMLASAGELQKGNELALPSKYVNFLYLASHYEKLKGSPEDNEQKQLFVEQHKHYLDEIIEQISEFSKRVILADANLDKVLSAYNKHRDKPIREQAENIIHLFTLTNLGAPAAFKYFDTTIDRKRYTSTKEVLDATLIHQSITGLYETRIDLSQLGGDGGGGSEAAAKPAPGGTLNIEDEYRLHETSKGPDVPLGSTWLSDFPQAWAETGGMGLAFRQAPLIISLKATSTPVSIKQYPMSQEARLGIKPHIQRLLDQGILVPCQSPWNTPLLPVKKPGTNDYRPVQDLREVNKRVEDIHPTVPNPYNLLSGLPPSHQWYTVLDLKDAFFCLRLHPTSQSLFAFEWKDPEMGISGQLTWTRLPQGFKNSPTLFNEALHRDLADFRIQHPDLILLQYVDDLLLAATSELDCQQGTRALLQTLGDLGYRASAKKAQICQKQVKYLGYLLKEGQRWLTEARKETVMGQPTPKTPRQLREFLGKAGLCRLFIPGFAEMAAPLYPLTKPGTLFKWGPDQQKAYQEIKQALLTAPALGLPDLTKPFELFVDEKQGYAKGVLTQKLGPWRRPVAYLSKKLDPVAAGWPPCLRMVAAIAVLTKDVGKLTMGQPLVILAPHAVEALVKQPPDRWLSNARMTHYQALLLDTDRVQFGPIVALNPATLLPLPEEGLQHDCLDILAEAHGTRPDLTDQPLPDADHTWYTDGSSFLQEGQRRAGAAVTTETEVIWAKALPAGTSAQRAELIALTQALKMAAGKKLNVYTDSRYAFATAHIHGEIYRRRGWLTSEGKEIKNKDEILALLKALFLPKRLSIIHCPGHQKGNHAEARGNRMADQAAREVATRETPETSTLLAGKRTADGSEFEKRTADGSEFESPKKKAKVE

SEQ ID NO: 7200 - protein, 2096 aa, synthetic construct
MPAAKRVKLDGGDKKYSIGLDIGTNSVGWAVITDEYKVPSKKFKVLGNTDRHSIKKNLIGALLFDSGETAEATRLKRTARRRYTRRKNRICYLQEIFSNEMAKVDDSFFHRLEESFLVEEDKKHERHPIFGNIVDEVAYHEKYPTIYHLRKKLVDSTDKADLRLIYLALAHMIKFRGHFLIEGDLNPDNSDVDKLFIQLVQTYNQLFEENPINASGVDAKAILSARLSKSRRLENLIAQLPGEKKNGLFGNLIALSLGLTPNFKSNFDLAEDAKLQLSKDTYDDDLDNLLAQIGDQYADLFLAAKNLSDAILLSDILRVNTEITKAPLSASMIKRYDEHHQDLTLLKALVRQQLPEKYKEIFFDQSKNGYAGYIDGGASQEEFYKFIKPILEKMDGTEELLVKLNREDLLRKQRTFDNGSIPHQIHLGELHAILRRQEDFYPFLKDNREKIEKILTFRIPYYVGPLARGNSRFAWMTRKSEETITPWNFEEVVDKGASAQSFIERMTNFDKNLPNEKVLPKHSLLYEYFTVYNELTKVKYVTEGMRKPAFLSGEQKKAIVDLLFKTNRKVTVKQLKEDYFKKIECFDSVEISGVEDRFNASLGTYHDLLKIIKDKDFLDNEENEDILEDIVLTLTLFEDREMIEERLKTYAHLFDDKVMKQLKRRRYTGWGRLSRKLINGIRDKQSGKTILDFLKSDGFANRNFMQLIHDDSLTFKEDIQKAQVSGQGDSLHEHIANLAGSPAIKKGILQTVKVVDELVKVMGRHKPENIVIEMARENQTTQKGQKNSRERMKRIEEGIKELGSQILKEHPVENTQLQNEKLYLYYLQNGRDMYVDQELDINRLSDYDVDHIVPQSFLKDDSIDNKVLTRSDKARGKSDNVPSEEVVKKMKNYWRQLLNAKLITQRKFDNLTKAERGGLSELDKAGFIKRQLVETRQITKHVAQILDSRMNTKYDENDKLIREVKVITLKSKLVSDFRKDFQFYKVREINNYHHAHDAYLNAVVGTALIKKYPKLESEFVYGDYKVYDVRKMIAKSEQEIGKATAKYFFYSNIMNFFKTEITLANGEIRKRPLIETNGETGEIVWDKGRDFATVRKVLSMPQVNIVKKTEVQTGGFSKESILPKRNSDKLIARKKDWDPKKYGGFDSPTVAYSVLVVAKVEKGKSKKLKSVKELLGITIMERSSFEKNPIDFLEAKGYKEVKKDLIIKLPKYSLFELENGRKRMLASAGELQKGNELALPSKYVNFLYLASHYEKLKGSPEDNEQKQLFVEQHKHYLDEIIEQISEFSKRVILADANLDKVLSAYNKHRDKPIREQAENIIHLFTLTNLGAPAAFKYFDTTIDRKRYTSTKEVLDATLIHQSITGLYETRIDLSQLGGDGGGGSEAAAKPAPGGTLNIEDEHRLHETSKEPDVSLGSTWLSDFPQAWAETGGMGLAVRQAPLIIPLKATSTPVSIKQYPMSQEARLGIKPHIQRLLDQGILVPCQSPWNTPLLPVKKPGTNDYRPVQDLREVNKRVEDIHPTVPNPYNLLSGLPPSHQWYTVLDLKDAFFCLRLHPTSQPLFAFEWRDPEMGISGQLTWTRLPQGFKNSPTLFDEALHRDLADFRIQHPDLILLQYVDDLLLAATSELDCQQGTRALLQTLGNLGYRASAKKAQICQKQVKYLGYLLKEGQRWLTEARKETVMGQPTPKTPRQLREFLGTAGFCRLWIPGFAEMAAPLYPLTKTGTLFNWGPDQQKAYQEIKQALLTAPALGLPDLTKPFELFVDEKQGYAKGVLTQKLGPWRRPVAYLSKKLDPVAAGWPPCLRMVAAIAVLTKDAGKLTMGQPLVILAPHAVEALVKQPPDRWLSNARMTHYQALLLDTDRVQFGPVVALNPATLLPLPEEGLQHNCLDILAEAHGTRPDLTDQPLPDADHTWYTDGSSLLQEGQRKAGAAVTTETEVIWAKALPAGTSAQRAELIALTQALKMAEGKKLNVYTDSRYAFATAHIHGEIYRRRGLLTSEGKEIKNKDEILALLKALFLPKRLSIIHCPGHQKGHSAEARGNRMADQAARKAAITETPDTSTLLAGKRTADGSEFEKRTADGSEFESPKKKAKVE

SEQ ID NO: 7201 - protein, 2090 aa, synthetic construct
MPAAKRVKLDGGDKKYSIGLDIGTNSVGWAVITDEYKVPSKKFKVLGNTDRHSIKKNLIGALLFDSGETAEATRLKRTARRRYTRRKNRICYLQEIFSNEMAKVDDSFFHRLEESFLVEEDKKHERHPIFGNIVDEVAYHEKYPTIYHLRKKLVDSTDKADLRLIYLALAHMIKFRGHFLIEGDLNPDNSDVDKLFIQLVQTYNQLFEENPINASGVDAKAILSARLSKSRRLENLIAQLPGEKKNGLFGNLIALSLGLTPNFKSNFDLAEDAKLQLSKDTYDDDLDNLLAQIGDQYADLFLAAKNLSDAILLSDILRVNTEITKAPLSASMIKRYDEHHQDLTLLKALVRQQLPEKYKEIFFDQSKNGYAGYIDGGASQEEFYKFIKPILEKMDGTEELLVKLNREDLLRKQRTFDNGSIPHQIHLGELHAILRRQEDFYPFLKDNREKIEKILTFRIPYYVGPLARGNSRFAWMTRKSEETITPWNFEEVVDKGASAQSFIERMTNFDKNLPNEKVLPKHSLLYEYFTVYNELTKVKYVTEGMRKPAFLSGEQKKAIVDLLFKTNRKVTVKQLKEDYFKKIECFDSVEISGVEDRFNASLGTYHDLLKIIKDKDFLDNEENEDILEDIVLTLTLFEDREMIEERLKTYAHLFDDKVMKQLKRRRYTGWGRLSRKLINGIRDKQSGKTILDFLKSDGFANRNFMQLIHDDSLTFKEDIQKAQVSGQGDSLHEHIANLAGSPAIKKGILQTVKVVDELVKVMGRHKPENIVIEMARENQTTQKGQKNSRERMKRIEEGIKELGSQILKEHPVENTQLQNEKLYLYYLQNGRDMYVDQELDINRLSDYDVDHIVPQSFLKDDSIDNKVLTRSDKARGKSDNVPSEEVVKKMKNYWRQLLNAKLITQRKFDNLTKAERGGLSELDKAGFIKRQLVETRQITKHVAQILDSRMNTKYDENDKLIREVKVITLKSKLVSDFRKDFQFYKVREINNYHHAHDAYLNAVVGTALIKKYPKLESEFVYGDYKVYDVRKMIAKSEQEIGKATAKYFFYSNIMNFFKTEITLANGEIRKRPLIETNGETGEIVWDKGRDFATVRKVLSMPQVNIVKKTEVQTGGFSKESILPKRNSDKLIARKKDWDPKKYGGFDSPTVAYSVLVVAKVEKGKSKKLKSVKELLGITIMERSSFEKNPIDFLEAKGYKEVKKDLIIKLPKYSLFELENGRKRMLASAGELQKGNELALPSKYVNFLYLASHYEKLKGSPEDNEQKQLFVEQHKHYLDEIIEQISEFSKRVILADANLDKVLSAYNKHRDKPIREQAENIIHLFTLTNLGAPAAFKYFDTTIDRKRYTSTKEVLDATLIHQSITGLYETRIDLSQLGGDGGGGSEAAAKPAPGGTLQLDDEYRLYSPLVKPDQNIQFWLEQFPQAWAETAGMGLAKQVPPQVIQLKASATPVSVRQYPLSKEAQEGIRPHVQRLIQQGILVPVQSPWNTPLLPVRKPGTNDYRPVQDLREVNKRVQDIHPTVPNPYNLLCALPPQRSWYTVLDLKDAFFCLRLHPTSQPLFAFEWRDPGTGRTGQLTWTRLPQGFKNSPTIFDEALHRDLANFRIQHPQVTLLQYVDDLLLAGATKQDCLEGTKALLLELSDLGYRASAKKAQICRREVTYLGYSLRDGQRWLTEARKKTVVQIPAPTTAKQVREFLGTAGFCRLWIPGFATLAAPLYPLTKEKGEFSWAPEHQKAFDAIKKALLSAPALALPDVTKPFTLYVDERKGVARGVLTQTLGPWRRPVAYLSKKLDPVASGWPVCLKAIAAVAILVKDADKLTLGQNITVIAPHALENIVRQPPDRWMTNARMTHYQSLLLTERVTFAPPAALNPATLLPEETDEPVTHDCHQLLIEETGVRKDLTDIPLTGEVLTWFTDGSSYVVEGKRMAGAAVVDGTRTIWASSLPEGTSAQKAELMALTQALRLAEGKSINIYTDSRYAFATAHVHGAIYKQRGLLTSAGREIKNKEEILSLLEALHLPKRLAIIHCPGHQKAKDPISRGNQMADRVAKQAAQGVNLLAGKRTADGSEFEKRTADGSEFESPKKKAKVE

SEQ ID NO: 7202 - protein, 2096 aa, synthetic construct
MPAAKRVKLDGGDKKYSIGLDIGTNSVGWAVITDEYKVPSKKFKVLGNTDRHSIKKNLIGALLFDSGETAEATRLKRTARRRYTRRKNRICYLQEIFSNEMAKVDDSFFHRLEESFLVEEDKKHERHPIFGNIVDEVAYHEKYPTIYHLRKKLVDSTDKADLRLIYLALAHMIKFRGHFLIEGDLNPDNSDVDKLFIQLVQTYNQLFEENPINASGVDAKAILSARLSKSRRLENLIAQLPGEKKNGLFGNLIALSLGLTPNFKSNFDLAEDAKLQLSKDTYDDDLDNLLAQIGDQYADLFLAAKNLSDAILLSDILRVNTEITKAPLSASMIKRYDEHHQDLTLLKALVRQQLPEKYKEIFFDQSKNGYAGYIDGGASQEEFYKFIKPILEKMDGTEELLVKLNREDLLRKQRTFDNGSIPHQIHLGELHAILRRQEDFYPFLKDNREKIEKILTFRIPYYVGPLARGNSRFAWMTRKSEETITPWNFEEVVDKGASAQSFIERMTNFDKNLPNEKVLPKHSLLYEYFTVYNELTKVKYVTEGMRKPAFLSGEQKKAIVDLLFKTNRKVTVKQLKEDYFKKIECFDSVEISGVEDRFNASLGTYHDLLKIIKDKDFLDNEENEDILEDIVLTLTLFEDREMIEERLKTYAHLFDDKVMKQLKRRRYTGWGRLSRKLINGIRDKQSGKTILDFLKSDGFANRNFMQLIHDDSLTFKEDIQKAQVSGQGDSLHEHIANLAGSPAIKKGILQTVKVVDELVKVMGRHKPENIVIEMARENQTTQKGQKNSRERMKRIEEGIKELGSQILKEHPVENTQLQNEKLYLYYLQNGRDMYVDQELDINRLSDYDVDHIVPQSFLKDDSIDNKVLTRSDKARGKSDNVPSEEVVKKMKNYWRQLLNAKLITQRKFDNLTKAERGGLSELDKAGFIKRQLVETRQITKHVAQILDSRMNTKYDENDKLIREVKVITLKSKLVSDFRKDFQFYKVREINNYHHAHDAYLNAVVGTALIKKYPKLESEFVYGDYKVYDVRKMIAKSEQEIGKATAKYFFYSNIMNFFKTEITLANGEIRKRPLIETNGETGEIVWDKGRDFATVRKVLSMPQVNIVKKTEVQTGGFSKESILPKRNSDKLIARKKDWDPKKYGGFDSPTVAYSVLVVAKVEKGKSKKLKSVKELLGITIMERSSFEKNPIDFLEAKGYKEVKKDLIIKLPKYSLFELENGRKRMLASAGELQKGNELALPSKYVNFLYLASHYEKLKGSPEDNEQKQLFVEQHKHYLDEIIEQISEFSKRVILADANLDKVLSAYNKHRDKPIREQAENIIHLFTLTNLGAPAAFKYFDTTIDRKRYTSTKEVLDATLIHQSITGLYETRIDLSQLGGDGGGGSEAAAKPAPGGTLNIEDEYRLHETSKEPDVPLGSTWLSDFPQAWAETGGMGLAVRQAPLIIPLKATSTPVSIKQYPMSQEARLGIKPHIQRLLDQGILVPCQSPWNTPLLPVKKPGTNDYRPVQDLREVNKRVEDIHPTVPNPYNLLSGLPPSHQWYTVLDLKDAFFCLRLHPTSQPLFAFEWRDPEMGISGQLTWTRLPQGFKNSPTLFDEALHRDLADFRIQHPDLILLQYVDDLLLAATSEQDCQRGTRALLQTLGNLGYRASAKKAQICQKQVKYLGYLLKEGQRWLTEARKETVMGQPTPKTPRQLREFLGTAGFCRLWIPGFAEMAAPLYPLTKTGTLFNWGPDQQKAYQEIKQALLTAPALGLPDLTKPFELFVDEKQGYAKGVLTQKLGPWRRPVAYLSKKLDPVAAGWPPCLRMVAAIAVLTKDAGKLTMGQPLVILAPHAVEALVKQPPDRWLSNARMTHYQAMLLDTDRVQFGPVVALNPATLLPLPEKEAPHDCLEILAETHGTRPDLTDQPIPDADYTWYTDGSSFLQEGQRRAGAAVTTETEVIWARALPAGTSAQRAELIALTQALKMAEGKKLNVYTDSRYAFATAHVHGEIYRRRGLLTSEGREIKNKNEILALLKALFLPKRLSIIHCPGHQKGNSAEARGNRMADQAAREAAMKAVLETSTLLAGKRTADGSEFEKRTADGSEFESPKKKAKVE

SEQ ID NO: 7203 - protein, 2096 aa, synthetic construct
MPAAKRVKLDGGDKKYSIGLDIGTNSVGWAVITDEYKVPSKKFKVLGNTDRHSIKKNLIGALLFDSGETAEATRLKRTARRRYTRRKNRICYLQEIFSNEMAKVDDSFFHRLEESFLVEEDKKHERHPIFGNIVDEVAYHEKYPTIYHLRKKLVDSTDKADLRLIYLALAHMIKFRGHFLIEGDLNPDNSDVDKLFIQLVQTYNQLFEENPINASGVDAKAILSARLSKSRRLENLIAQLPGEKKNGLFGNLIALSLGLTPNFKSNFDLAEDAKLQLSKDTYDDDLDNLLAQIGDQYADLFLAAKNLSDAILLSDILRVNTEITKAPLSASMIKRYDEHHQDLTLLKALVRQQLPEKYKEIFFDQSKNGYAGYIDGGASQEEFYKFIKPILEKMDGTEELLVKLNREDLLRKQRTFDNGSIPHQIHLGELHAILRRQEDFYPFLKDNREKIEKILTFRIPYYVGPLARGNSRFAWMTRKSEETITPWNFEEVVDKGASAQSFIERMTNFDKNLPNEKVLPKHSLLYEYFTVYNELTKVKYVTEGMRKPAFLSGEQKKAIVDLLFKTNRKVTVKQLKEDYFKKIECFDSVEISGVEDRFNASLGTYHDLLKIIKDKDFLDNEENEDILEDIVLTLTLFEDREMIEERLKTYAHLFDDKVMKQLKRRRYTGWGRLSRKLINGIRDKQSGKTILDFLKSDGFANRNFMQLIHDDSLTFKEDIQKAQVSGQGDSLHEHIANLAGSPAIKKGILQTVKVVDELVKVMGRHKPENIVIEMARENQTTQKGQKNSRERMKRIEEGIKELGSQILKEHPVENTQLQNEKLYLYYLQNGRDMYVDQELDINRLSDYDVDHIVPQSFLKDDSIDNKVLTRSDKARGKSDNVPSEEVVKKMKNYWRQLLNAKLITQRKFDNLTKAERGGLSELDKAGFIKRQLVETRQITKHVAQILDSRMNTKYDENDKLIREVKVITLKSKLVSDFRKDFQFYKVREINNYHHAHDAYLNAVVGTALIKKYPKLESEFVYGDYKVYDVRKMIAKSEQEIGKATAKYFFYSNIMNFFKTEITLANGEIRKRPLIETNGETGEIVWDKGRDFATVRKVLSMPQVNIVKKTEVQTGGFSKESILPKRNSDKLIARKKDWDPKKYGGFDSPTVAYSVLVVAKVEKGKSKKLKSVKELLGITIMERSSFEKNPIDFLEAKGYKEVKKDLIIKLPKYSLFELENGRKRMLASAGELQKGNELALPSKYVNFLYLASHYEKLKGSPEDNEQKQLFVEQHKHYLDEIIEQISEFSKRVILADANLDKVLSAYNKHRDKPIREQAENIIHLFTLTNLGAPAAFKYFDTTIDRKRYTSTKEVLDATLIHQSITGLYETRIDLSQLGGDGGGGSEAAAKPAPGGTLNIEDEYRLHETSKEPDVPLGSTWLSDFPQAWAETGGMGLAVRQAPLIIPLKATSTPVSIKQYPMSQEARLGIKPHIQRLLDQGILVPCQSPWNTPLLPVKKPGTNDYRPVQDLREVNKRVEDIHPTVPNPYNLLSGLPPSHQWYTVLDLKDAFFCLRLHPTSQPLFAFEWRDPEMGISGQLTWTRLPQGFKNSPTLFNEALHRDLADFRIQHPDLILLQYVDDLLLAATSEQDCQRGTRALLQTLGNLGYRASAKKAQICQKQVKYLGYLLKEGQRWLTEARKETVMGQPTPKTPRQLREFLGTAGFCRLWIPGFAEMAAPLYPLTKPGTLFNWGPDQQKAYQEIKQALLTAPALGLPDLTKPFELFVDEKQGYAKGVLTQKLGPWRRPVAYLSKKLDPVAAGWPPCLRMVAAIAVLTKDAGKLTMGQPLVILAPHAVEALVKQPPDRWLSNARMTHYQAMLLDTDRVQFGPVVALNPATLLPLPEKEAPHDCLEILAETHGTRPDLTDQPIPDADYTWYTDGSSFLQEGQRRAGAAVTTETEVIWARALPAGTSAQRAELIALTQALKMAEGKKLNVYTDSRYAFATAHVHGEIYRRRGWLTSEGREIKNKNEILALLKALFLPKRLSIIHCPGHQKGNSAEARGNRMADQAAREAAMKAVLETSTLLAGKRTADGSEFEKRTADGSEFESPKKKAKVE

SEQ ID NO: 7204 - protein, 2098 aa, synthetic construct
MPAAKRVKLDGGDKKYSIGLDIGTNSVGWAVITDEYKVPSKKFKVLGNTDRHSIKKNLIGALLFDSGETAEATRLKRTARRRYTRRKNRICYLQEIFSNEMAKVDDSFFHRLEESFLVEEDKKHERHPIFGNIVDEVAYHEKYPTIYHLRKKLVDSTDKADLRLIYLALAHMIKFRGHFLIEGDLNPDNSDVDKLFIQLVQTYNQLFEENPINASGVDAKAILSARLSKSRRLENLIAQLPGEKKNGLFGNLIALSLGLTPNFKSNFDLAEDAKLQLSKDTYDDDLDNLLAQIGDQYADLFLAAKNLSDAILLSDILRVNTEITKAPLSASMIKRYDEHHQDLTLLKALVRQQLPEKYKEIFFDQSKNGYAGYIDGGASQEEFYKFIKPILEKMDGTEELLVKLNREDLLRKQRTFDNGSIPHQIHLGELHAILRRQEDFYPFLKDNREKIEKILTFRIPYYVGPLARGNSRFAWMTRKSEETITPWNFEEVVDKGASAQSFIERMTNFDKNLPNEKVLPKHSLLYEYFTVYNELTKVKYVTEGMRKPAFLSGEQKKAIVDLLFKTNRKVTVKQLKEDYFKKIECFDSVEISGVEDRFNASLGTYHDLLKIIKDKDFLDNEENEDILEDIVLTLTLFEDREMIEERLKTYAHLFDDKVMKQLKRRRYTGWGRLSRKLINGIRDKQSGKTILDFLKSDGFANRNFMQLIHDDSLTFKEDIQKAQVSGQGDSLHEHIANLAGSPAIKKGILQTVKVVDELVKVMGRHKPENIVIEMARENQTTQKGQKNSRERMKRIEEGIKELGSQILKEHPVENTQLQNEKLYLYYLQNGRDMYVDQELDINRLSDYDVDHIVPQSFLKDDSIDNKVLTRSDKARGKSDNVPSEEVVKKMKNYWRQLLNAKLITQRKFDNLTKAERGGLSELDKAGFIKRQLVETRQITKHVAQILDSRMNTKYDENDKLIREVKVITLKSKLVSDFRKDFQFYKVREINNYHHAHDAYLNAVVGTALIKKYPKLESEFVYGDYKVYDVRKMIAKSEQEIGKATAKYFFYSNIMNFFKTEITLANGEIRKRPLIETNGETGEIVWDKGRDFATVRKVLSMPQVNIVKKTEVQTGGFSKESILPKRNSDKLIARKKDWDPKKYGGFDSPTVAYSVLVVAKVEKGKSKKLKSVKELLGITIMERSSFEKNPIDFLEAKGYKEVKKDLIIKLPKYSLFELENGRKRMLASAGELQKGNELALPSKYVNFLYLASHYEKLKGSPEDNEQKQLFVEQHKHYLDEIIEQISEFSKRVILADANLDKVLSAYNKHRDKPIREQAENIIHLFTLTNLGAPAAFKYFDTTIDRKRYTSTKEVLDATLIHQSITGLYETRIDLSQLGGDGGGGSPAPEAAAKGGTAPLEEEYRLFLEAPIQNVTLLEQWKREIPKVWAEINPPGLASTQAPIHVQLLSTALPVRVRQYPITLEAKRSLRETIRKFRAAGILRPVHSPWNTPLLPVRKSGTSEYRMVQDLREVNKRVETIHPTVPNPYTLLSLLPPDRIWYSVLDLKDAFFCIPLAPESQLIFAFEWADAEEGESGQLTWTRLPQGFKNSPTLFNEALNRDLQGFRLDHPSVSLLQYVDDLLIAADTQAACLSATRDLLMTLAELGYRVSGKKAQLCQEEVTYLGFKIHKGSRSLSNSRTQAILQIPVPKTKRQVREFLGKIGYCRLFIPGFAELAQPLYAATRPGNDPLVWGEKEEEAFQSLKLALTQPPALALPSLDKPFQLFVEETSGAAKGVLTQALGPWKRPVAYLSKRLDPVAAGWPRCLRAIAAAALLTREASKLTFGQDIEITSSHNLESLLRSPPDKWLTNARITQYQVLLLDPPRVRFKQTAALNPATLLPETDDTLPIHHCLDTLDSLTSTRPDLTDQPLAQAEATLFTDGSSYIRDGKRYAGAAVVTLDSVIWAEPLPIGTSAQKAELIALTKALEWSKDKSVNIYTDSRYAFATLHVHGMIYRERGWLTAGGKAIKNAPEILALLTAVWLPKRVAVMHCKGHQKDDAPTSTGNRRADEVAREVAIRPLSTQATISAGKRTADGSEFEKRTADGSEFESPKKKAKVE

SEQ ID NO: 7205 - protein, 2218 aa, synthetic construct
MPAAKRVKLDGGDKKYSIGLDIGTNSVGWAVITDEYKVPSKKFKVLGNTDRHSIKKNLIGALLFDSGETAEATRLKRTARRRYTRRKNRICYLQEIFSNEMAKVDDSFFHRLEESFLVEEDKKHERHPIFGNIVDEVAYHEKYPTIYHLRKKLVDSTDKADLRLIYLALAHMIKFRGHFLIEGDLNPDNSDVDKLFIQLVQTYNQLFEENPINASGVDAKAILSARLSKSRRLENLIAQLPGEKKNGLFGNLIALSLGLTPNFKSNFDLAEDAKLQLSKDTYDDDLDNLLAQIGDQYADLFLAAKNLSDAILLSDILRVNTEITKAPLSASMIKRYDEHHQDLTLLKALVRQQLPEKYKEIFFDQSKNGYAGYIDGGASQEEFYKFIKPILEKMDGTEELLVKLNREDLLRKQRTFDNGSIPHQIHLGELHAILRRQEDFYPFLKDNREKIEKILTFRIPYYVGPLARGNSRFAWMTRKSEETITPWNFEEVVDKGASAQSFIERMTNFDKNLPNEKVLPKHSLLYEYFTVYNELTKVKYVTEGMRKPAFLSGEQKKAIVDLLFKTNRKVTVKQLKEDYFKKIECFDSVEISGVEDRFNASLGTYHDLLKIIKDKDFLDNEENEDILEDIVLTLTLFEDREMIEERLKTYAHLFDDKVMKQLKRRRYTGWGRLSRKLINGIRDKQSGKTILDFLKSDGFANRNFMQLIHDDSLTFKEDIQKAQVSGQGDSLHEHIANLAGSPAIKKGILQTVKVVDELVKVMGRHKPENIVIEMARENQTTQKGQKNSRERMKRIEEGIKELGSQILKEHPVENTQLQNEKLYLYYLQNGRDMYVDQELDINRLSDYDVDHIVPQSFLKDDSIDNKVLTRSDKARGKSDNVPSEEVVKKMKNYWRQLLNAKLITQRKFDNLTKAERGGLSELDKAGFIKRQLVETRQITKHVAQILDSRMNTKYDENDKLIREVKVITLKSKLVSDFRKDFQFYKVREINNYHHAHDAYLNAVVGTALIKKYPKLESEFVYGDYKVYDVRKMIAKSEQEIGKATAKYFFYSNIMNFFKTEITLANGEIRKRPLIETNGETGEIVWDKGRDFATVRKVLSMPQVNIVKKTEVQTGGFSKESILPKRNSDKLIARKKDWDPKKYGGFDSPTVAYSVLVVAKVEKGKSKKLKSVKELLGITIMERSSFEKNPIDFLEAKGYKEVKKDLIIKLPKYSLFELENGRKRMLASAGELQKGNELALPSKYVNFLYLASHYEKLKGSPEDNEQKQLFVEQHKHYLDEIIEQISEFSKRVILADANLDKVLSAYNKHRDKPIREQAENIIHLFTLTNLGAPAAFKYFDTTIDRKRYTSTKEVLDATLIHQSITGLYETRIDLSQLGGDGGGGSPAPEAAAKGGTLGDQGSRGSDPLPEPRVTLTVEGIPTEFLVNTGAEHSVLTKPMGKMGSKRTVVAGATGSKVYPWTTKRLLKIGQKQVTHSFLVIPECPAPLLGRDLLTKLKAQIQFSTEGPQVTWEDRPAMCLVLNLEEEYRLHEKPVPPSIDPSWLQLFPMVWAEKAGMGLANQVPPVVVELKSDASPVAVRQYPMSKEAREGIRPHIQRFLDLGILVPCQSPWNTPLLPVKKPGTNDYRPVQDLREVNKRVQDIHPTVPNPYNLLSSLPPSHTWYSVLDLKDAFFCLKLHPNSQPLFAFEWRDPEKGNTGQLTWTRLPQGFKNSPTLFNEALHRDLASFRALNPQVVMLQYVDDLLVAAPTYRDCKEGTRRLLQELSKLGYRVSAKKAQLCREEVTYLGYLLKGGKRWLTPARKATVMKIPTPTTPRQVREFLGTAGFCRLWIPGFASLAAPLYPLTRPKVPFTWTEAHQEAFGRIKEALLSAPALALPDLTKPFALYVDEKEGVARGVLTQTLGPWRRPVAYLSKKLDPVASGWPTCLKAIAAVALLLKDADKLTLGQNVLVIAPHNLESIVRQPPDRWMTNARMTHYQSLLLNERVSFAPPAILNPATLLPVESDDTPIHICSEILAEETGTRPDLRDQPLPGVPAWYTDGSSFIMDGRRQAGAAIVDNKRTVWASNLPEGTSAQKAELIALTQALRLAEGKSINIYTDSRYAFATAHVHGAIYKQRGWLTSAGKDIKNKEEILALLEAIHLPKRVAIIHCPGHQRGTDPVATGNRKADEAAKQAAQSTRILTETTKNAGKRTADGSEFEKRTADGSEFESPKKKAKVE

SEQ ID NO: 7206 - protein, 2096 aa, synthetic construct
MPAAKRVKLDGGDKKYSIGLDIGTNSVGWAVITDEYKVPSKKFKVLGNTDRHSIKKNLIGALLFDSGETAEATRLKRTARRRYTRRKNRICYLQEIFSNEMAKVDDSFFHRLEESFLVEEDKKHERHPIFGNIVDEVAYHEKYPTIYHLRKKLVDSTDKADLRLIYLALAHMIKFRGHFLIEGDLNPDNSDVDKLFIQLVQTYNQLFEENPINASGVDAKAILSARLSKSRRLENLIAQLPGEKKNGLFGNLIALSLGLTPNFKSNFDLAEDAKLQLSKDTYDDDLDNLLAQIGDQYADLFLAAKNLSDAILLSDILRVNTEITKAPLSASMIKRYDEHHQDLTLLKALVRQQLPEKYKEIFFDQSKNGYAGYIDGGASQEEFYKFIKPILEKMDGTEELLVKLNREDLLRKQRTFDNGSIPHQIHLGELHAILRRQEDFYPFLKDNREKIEKILTFRIPYYVGPLARGNSRFAWMTRKSEETITPWNFEEVVDKGASAQSFIERMTNFDKNLPNEKVLPKHSLLYEYFTVYNELTKVKYVTEGMRKPAFLSGEQKKAIVDLLFKTNRKVTVKQLKEDYFKKIECFDSVEISGVEDRFNASLGTYHDLLKIIKDKDFLDNEENEDILEDIVLTLTLFEDREMIEERLKTYAHLFDDKVMKQLKRRRYTGWGRLSRKLINGIRDKQSGKTILDFLKSDGFANRNFMQLIHDDSLTFKEDIQKAQVSGQGDSLHEHIANLAGSPAIKKGILQTVKVVDELVKVMGRHKPENIVIEMARENQTTQKGQKNSRERMKRIEEGIKELGSQILKEHPVENTQLQNEKLYLYYLQNGRDMYVDQELDINRLSDYDVDHIVPQSFLKDDSIDNKVLTRSDKARGKSDNVPSEEVVKKMKNYWRQLLNAKLITQRKFDNLTKAERGGLSELDKAGFIKRQLVETRQITKHVAQILDSRMNTKYDENDKLIREVKVITLKSKLVSDFRKDFQFYKVREINNYHHAHDAYLNAVVGTALIKKYPKLESEFVYGDYKVYDVRKMIAKSEQEIGKATAKYFFYSNIMNFFKTEITLANGEIRKRPLIETNGETGEIVWDKGRDFATVRKVLSMPQVNIVKKTEVQTGGFSKESILPKRNSDKLIARKKDWDPKKYGGFDSPTVAYSVLVVAKVEKGKSKKLKSVKELLGITIMERSSFEKNPIDFLEAKGYKEVKKDLIIKLPKYSLFELENGRKRMLASAGELQKGNELALPSKYVNFLYLASHYEKLKGSPEDNEQKQLFVEQHKHYLDEIIEQISEFSKRVILADANLDKVLSAYNKHRDKPIREQAENIIHLFTLTNLGAPAAFKYFDTTIDRKRYTSTKEVLDATLIHQSITGLYETRIDLSQLGGDGGGGSPAPEAAAKGGTLNIEDEHRLHETSKEPDVSLGSTWLSDFPQAWAETGGMGLAVRQAPLIIPLKATSTPVSIKQYPMSQEARLGIKPHIQRLLDQGILVPCQSPWNTPLLPVKKPGTNDYRPVQDLREVNKRVEDIHPTVPNPYNLLSGLPPSHQWYTVLDLKDAFFCLRLHPTSQPLFAFEWRDPEMGISGQLTWTRLPQGFKNSPTLFDEALHRDLADFRIQHPDLILLQYVDDLLLAATSELDCQQGTRALLQTLGNLGYRASAKKAQICQKQVKYLGYLLKEGQRWLTEARKETVMGQPTPKTPRQLREFLGTAGFCRLWIPGFAEMAAPLYPLTKTGTLFNWGPDQQKAYQEIKQALLTAPALGLPDLTKPFELFVDEKQGYAKGVLTQKLGPWRRPVAYLSKKLDPVAAGWPPCLRMVAAIAVLTKDAGKLTMGQPLVILAPHAVEALVKQPPDRWLSNARMTHYQALLLDTDRVQFGPVVALNPATLLPLPEEGLQHNCLDILAEAHGTRPDLTDQPLPDADHTWYTDGSSLLQEGQRKAGAAVTTETEVIWAKALPAGTSAQRAELIALTQALKMAEGKKLNVYTDSRYAFATAHIHGEIYRRRGLLTSEGKEIKNKDEILALLKALFLPKRLSIIHCPGHQKGHSAEARGNRMADQAARKAAITETPDTSTLLAGKRTADGSEFEKRTADGSEFESPKKKAKVE

SEQ ID NO: 7207 - protein, 2090 aa, synthetic construct
MPAAKRVKLDGGDKKYSIGLDIGTNSVGWAVITDEYKVPSKKFKVLGNTDRHSIKKNLIGALLFDSGETAEATRLKRTARRRYTRRKNRICYLQEIFSNEMAKVDDSFFHRLEESFLVEEDKKHERHPIFGNIVDEVAYHEKYPTIYHLRKKLVDSTDKADLRLIYLALAHMIKFRGHFLIEGDLNPDNSDVDKLFIQLVQTYNQLFEENPINASGVDAKAILSARLSKSRRLENLIAQLPGEKKNGLFGNLIALSLGLTPNFKSNFDLAEDAKLQLSKDTYDDDLDNLLAQIGDQYADLFLAAKNLSDAILLSDILRVNTEITKAPLSASMIKRYDEHHQDLTLLKALVRQQLPEKYKEIFFDQSKNGYAGYIDGGASQEEFYKFIKPILEKMDGTEELLVKLNREDLLRKQRTFDNGSIPHQIHLGELHAILRRQEDFYPFLKDNREKIEKILTFRIPYYVGPLARGNSRFAWMTRKSEETITPWNFEEVVDKGASAQSFIERMTNFDKNLPNEKVLPKHSLLYEYFTVYNELTKVKYVTEGMRKPAFLSGEQKKAIVDLLFKTNRKVTVKQLKEDYFKKIECFDSVEISGVEDRFNASLGTYHDLLKIIKDKDFLDNEENEDILEDIVLTLTLFEDREMIEERLKTYAHLFDDKVMKQLKRRRYTGWGRLSRKLINGIRDKQSGKTILDFLKSDGFANRNFMQLIHDDSLTFKEDIQKAQVSGQGDSLHEHIANLAGSPAIKKGILQTVKVVDELVKVMGRHKPENIVIEMARENQTTQKGQKNSRERMKRIEEGIKELGSQILKEHPVENTQLQNEKLYLYYLQNGRDMYVDQELDINRLSDYDVDHIVPQSFLKDDSIDNKVLTRSDKARGKSDNVPSEEVVKKMKNYWRQLLNAKLITQRKFDNLTKAERGGLSELDKAGFIKRQLVETRQITKHVAQILDSRMNTKYDENDKLIREVKVITLKSKLVSDFRKDFQFYKVREINNYHHAHDAYLNAVVGTALIKKYPKLESEFVYGDYKVYDVRKMIAKSEQEIGKATAKYFFYSNIMNFFKTEITLANGEIRKRPLIETNGETGEIVWDKGRDFATVRKVLSMPQVNIVKKTEVQTGGFSKESILPKRNSDKLIARKKDWDPKKYGGFDSPTVAYSVLVVAKVEKGKSKKLKSVKELLGITIMERSSFEKNPIDFLEAKGYKEVKKDLIIKLPKYSLFELENGRKRMLASAGELQKGNELALPSKYVNFLYLASHYEKLKGSPEDNEQKQLFVEQHKHYLDEIIEQISEFSKRVILADANLDKVLSAYNKHRDKPIREQAENIIHLFTLTNLGAPAAFKYFDTTIDRKRYTSTKEVLDATLIHQSITGLYETRIDLSQLGGDGGGGSPAPEAAAKGGTLQLDDEYRLYSPLVKPDQNIQFWLEQFPQAWAETAGMGLAKQVPPQVIQLKASATPVSVRQYPLSKEAQEGIRPHVQRLIQQGILVPVQSPWNTPLLPVRKPGTNDYRPVQDLREVNKRVQDIHPTVPNPYNLLCALPPQRSWYTVLDLKDAFFCLRLHPTSQPLFAFEWRDPGTGRTGQLTWTRLPQGFKNSPTIFDEALHRDLANFRIQHPQVTLLQYVDDLLLAGATKQDCLEGTKALLLELSDLGYRASAKKAQICRREVTYLGYSLRDGQRWLTEARKKTVVQIPAPTTAKQVREFLGTAGFCRLWIPGFATLAAPLYPLTKEKGEFSWAPEHQKAFDAIKKALLSAPALALPDVTKPFTLYVDERKGVARGVLTQTLGPWRRPVAYLSKKLDPVASGWPVCLKAIAAVAILVKDADKLTLGQNITVIAPHALENIVRQPPDRWMTNARMTHYQSLLLTERVTFAPPAALNPATLLPEETDEPVTHDCHQLLIEETGVRKDLTDIPLTGEVLTWFTDGSSYVVEGKRMAGAAVVDGTRTIWASSLPEGTSAQKAELMALTQALRLAEGKSINIYTDSRYAFATAHVHGAIYKQRGLLTSAGREIKNKEEILSLLEALHLPKRLAIIHCPGHQKAKDPISRGNQMADRVAKQAAQGVNLLAGKRTADGSEFEKRTADGSEFESPKKKAKVE

SEQ ID NO: 7208 - protein, 2087 aa, synthetic construct
MPAAKRVKLDGGDKKYSIGLDIGTNSVGWAVITDEYKVPSKKFKVLGNTDRHSIKKNLIGALLFDSGETAEATRLKRTARRRYTRRKNRICYLQEIFSNEMAKVDDSFFHRLEESFLVEEDKKHERHPIFGNIVDEVAYHEKYPTIYHLRKKLVDSTDKADLRLIYLALAHMIKFRGHFLIEGDLNPDNSDVDKLFIQLVQTYNQLFEENPINASGVDAKAILSARLSKSRRLENLIAQLPGEKKNGLFGNLIALSLGLTPNFKSNFDLAEDAKLQLSKDTYDDDLDNLLAQIGDQYADLFLAAKNLSDAILLSDILRVNTEITKAPLSASMIKRYDEHHQDLTLLKALVRQQLPEKYKEIFFDQSKNGYAGYIDGGASQEEFYKFIKPILEKMDGTEELLVKLNREDLLRKQRTFDNGSIPHQIHLGELHAILRRQEDFYPFLKDNREKIEKILTFRIPYYVGPLARGNSRFAWMTRKSEETITPWNFEEVVDKGASAQSFIERMTNFDKNLPNEKVLPKHSLLYEYFTVYNELTKVKYVTEGMRKPAFLSGEQKKAIVDLLFKTNRKVTVKQLKEDYFKKIECFDSVEISGVEDRFNASLGTYHDLLKIIKDKDFLDNEENEDILEDIVLTLTLFEDREMIEERLKTYAHLFDDKVMKQLKRRRYTGWGRLSRKLINGIRDKQSGKTILDFLKSDGFANRNFMQLIHDDSLTFKEDIQKAQVSGQGDSLHEHIANLAGSPAIKKGILQTVKVVDELVKVMGRHKPENIVIEMARENQTTQKGQKNSRERMKRIEEGIKELGSQILKEHPVENTQLQNEKLYLYYLQNGRDMYVDQELDINRLSDYDVDHIVPQSFLKDDSIDNKVLTRSDKARGKSDNVPSEEVVKKMKNYWRQLLNAKLITQRKFDNLTKAERGGLSELDKAGFIKRQLVETRQITKHVAQILDSRMNTKYDENDKLIREVKVITLKSKLVSDFRKDFQFYKVREINNYHHAHDAYLNAVVGTALIKKYPKLESEFVYGDYKVYDVRKMIAKSEQEIGKATAKYFFYSNIMNFFKTEITLANGEIRKRPLIETNGETGEIVWDKGRDFATVRKVLSMPQVNIVKKTEVQTGGFSKESILPKRNSDKLIARKKDWDPKKYGGFDSPTVAYSVLVVAKVEKGKSKKLKSVKELLGITIMERSSFEKNPIDFLEAKGYKEVKKDLIIKLPKYSLFELENGRKRMLASAGELQKGNELALPSKYVNFLYLASHYEKLKGSPEDNEQKQLFVEQHKHYLDEIIEQISEFSKRVILADANLDKVLSAYNKHRDKPIREQAENIIHLFTLTNLGAPAAFKYFDTTIDRKRYTSTKEVLDATLIHQSITGLYETRIDLSQLGGDGGGGSPAPEAAAKGGIPWLMKKPLQLTTLVPLQEYEERLLKQTMLTGSYKEKLQSLFLKYDALWQHWENQVGHRRIKPHHIATGTVNPRPQKQYPINPKAKASIQTVINDLLKQGVLIQQNSIMNTPVYPVPKPDGKWRMVLDYREVNKTIPLIAAQNQHSAGILSSIFRGKYKTTLDLSNGFWAHSITPESYWLTAFTWLGQQYCWTRLPQGFLNSPALFNADVVDLLKEVPNVQVYVDDIYISHDDPREHLEQLEKVFSLLLNAGYVVSLKKSEIAQHEVEFLGFNITKEGRGLTETFKQKLLNITPPRDLKQLQSILGLLNFARNFIPNFSELVKPLYNIIATAPGKYITWTTDNSQQLQNIISMLNSAENLEERNPEVRLIMKVNTSPSAGYIRFYNEFAKRPIMYLNYVYTKAEVKFTNTEKLLTTIHKGLIKALDLGMGQEILVYSPIVSMTKIQKTPLPERKALPIRWITWMSYLEDPRIQFHYDKTLPELQQVPTVTDDIIAKIKHPSEFSMVFYTDGSAIKHPNVNKSHNAGMGIAQVQFKPEFTVINTWSIPLGDHTAQLAEVAAVEFACKKALKIDGPVLIVTDSFYVAESVNKELPYWQSNGFFNNKKKPLKHVSKWKSIADCIQLKPDIIIIHEKGHQPTASTFHTEGNNLADKLATQGSYVVNAGKRTADGSEFEKRTADGSEFESPKKKAKVE

SEQ ID NO: 7209 - protein, 2094 aa, synthetic construct
MPAAKRVKLDGGDKKYSIGLDIGTNSVGWAVITDEYKVPSKKFKVLGNTDRHSIKKNLIGALLFDSGETAEATRLKRTARRRYTRRKNRICYLQEIFSNEMAKVDDSFFHRLEESFLVEEDKKHERHPIFGNIVDEVAYHEKYPTIYHLRKKLVDSTDKADLRLIYLALAHMIKFRGHFLIEGDLNPDNSDVDKLFIQLVQTYNQLFEENPINASGVDAKAILSARLSKSRRLENLIAQLPGEKKNGLFGNLIALSLGLTPNFKSNFDLAEDAKLQLSKDTYDDDLDNLLAQIGDQYADLFLAAKNLSDAILLSDILRVNTEITKAPLSASMIKRYDEHHQDLTLLKALVRQQLPEKYKEIFFDQSKNGYAGYIDGGASQEEFYKFIKPILEKMDGTEELLVKLNREDLLRKQRTFDNGSIPHQIHLGELHAILRRQEDFYPFLKDNREKIEKILTFRIPYYVGPLARGNSRFAWMTRKSEETITPWNFEEVVDKGASAQSFIERMTNFDKNLPNEKVLPKHSLLYEYFTVYNELTKVKYVTEGMRKPAFLSGEQKKAIVDLLFKTNRKVTVKQLKEDYFKKIECFDSVEISGVEDRFNASLGTYHDLLKIIKDKDFLDNEENEDILEDIVLTLTLFEDREMIEERLKTYAHLFDDKVMKQLKRRRYTGWGRLSRKLINGIRDKQSGKTILDFLKSDGFANRNFMQLIHDDSLTFKEDIQKAQVSGQGDSLHEHIANLAGSPAIKKGILQTVKVVDELVKVMGRHKPENIVIEMARENQTTQKGQKNSRERMKRIEEGIKELGSQILKEHPVENTQLQNEKLYLYYLQNGRDMYVDQELDINRLSDYDVDHIVPQSFLKDDSIDNKVLTRSDKARGKSDNVPSEEVVKKMKNYWRQLLNAKLITQRKFDNLTKAERGGLSELDKAGFIKRQLVETRQITKHVAQILDSRMNTKYDENDKLIREVKVITLKSKLVSDFRKDFQFYKVREINNYHHAHDAYLNAVVGTALIKKYPKLESEFVYGDYKVYDVRKMIAKSEQEIGKATAKYFFYSNIMNFFKTEITLANGEIRKRPLIETNGETGEIVWDKGRDFATVRKVLSMPQVNIVKKTEVQTGGFSKESILPKRNSDKLIARKKDWDPKKYGGFDSPTVAYSVLVVAKVEKGKSKKLKSVKELLGITIMERSSFEKNPIDFLEAKGYKEVKKDLIIKLPKYSLFELENGRKRMLASAGELQKGNELALPSKYVNFLYLASHYEKLKGSPEDNEQKQLFVEQHKHYLDEIIEQISEFSKRVILADANLDKVLSAYNKHRDKPIREQAENIIHLFTLTNLGAPAAFKYFDTTIDRKRYTSTKEVLDATLIHQSITGLYETRIDLSQLGGDGGGGSPAPEAAAKGGVLNLEEEYRLHEKPVPSSIDPSWLQLFPTVWAERAGMGLANQVPPVVVELRSGASPVAVRQYPMSKEAREGIRPHIQRFLDLGVLVPCQSPWNTPLLPVKKPGTNDYRPVQDLREINKRVQDIHPTVPNPYNLLSSLPPSHTWYSVLDLKDAFFCLKLHPNSQPLFAFEWRDPEKGNTGQLTWTRLPQGFKNSPTLFNEALHRDLAPFRALNPQVVLLQYVDDLLVAAPTYRDCKEGTQKLLQELSKLGYRVSAKKAQLCQKEVTYLGYLLKEGKRWLTPARKATVMKIPPPTTPRQVREFLGTAGFCRLWIPGFASLAAPLYPLTKPSIPFIWTEEHQKAFDRIKEALLSAPALALPDLTKPFTLYVDERAGVARGVLTQTLGPWRRPVAYLSKKLDPVASGWPTCLKAVAAVALLLKDADKLTLGQNVTVIASHSLESIVRQPPDRWMTNARMTHYQSLLLNERVSFAPPAVLNPATLLPVESEATPVHRCSEILAEETGTRRDLKDQPLPGVPAWYTDGSSFIAEGKRRAGAAIVDGKRTVWASSLPEGTSAQKAELVALTQALRLAEGKDINIYTDSRYAFATAHIHGAIYKQRGWLTSAGKDIKNKEEILALLEAIHLPKRVAIIHCPGHQKGNDPVATGNRRADEAAKQAALSTRVLAETTKPAGKRTADGSEFEKRTADGSEFESPKKKAKVE

SEQ ID NO: 7210 - protein, 2102 aa, synthetic construct
MPAAKRVKLDGGDKKYSIGLDIGTNSVGWAVITDEYKVPSKKFKVLGNTDRHSIKKNLIGALLFDSGETAEATRLKRTARRRYTRRKNRICYLQEIFSNEMAKVDDSFFHRLEESFLVEEDKKHERHPIFGNIVDEVAYHEKYPTIYHLRKKLVDSTDKADLRLIYLALAHMIKFRGHFLIEGDLNPDNSDVDKLFIQLVQTYNQLFEENPINASGVDAKAILSARLSKSRRLENLIAQLPGEKKNGLFGNLIALSLGLTPNFKSNFDLAEDAKLQLSKDTYDDDLDNLLAQIGDQYADLFLAAKNLSDAILLSDILRVNTEITKAPLSASMIKRYDEHHQDLTLLKALVRQQLPEKYKEIFFDQSKNGYAGYIDGGASQEEFYKFIKPILEKMDGTEELLVKLNREDLLRKQRTFDNGSIPHQIHLGELHAILRRQEDFYPFLKDNREKIEKILTFRIPYYVGPLARGNSRFAWMTRKSEETITPWNFEEVVDKGASAQSFIERMTNFDKNLPNEKVLPKHSLLYEYFTVYNELTKVKYVTEGMRKPAFLSGEQKKAIVDLLFKTNRKVTVKQLKEDYFKKIECFDSVEISGVEDRFNASLGTYHDLLKIIKDKDFLDNEENEDILEDIVLTLTLFEDREMIEERLKTYAHLFDDKVMKQLKRRRYTGWGRLSRKLINGIRDKQSGKTILDFLKSDGFANRNFMQLIHDDSLTFKEDIQKAQVSGQGDSLHEHIANLAGSPAIKKGILQTVKVVDELVKVMGRHKPENIVIEMARENQTTQKGQKNSRERMKRIEEGIKELGSQILKEHPVENTQLQNEKLYLYYLQNGRDMYVDQELDINRLSDYDVDHIVPQSFLKDDSIDNKVLTRSDKARGKSDNVPSEEVVKKMKNYWRQLLNAKLITQRKFDNLTKAERGGLSELDKAGFIKRQLVETRQITKHVAQILDSRMNTKYDENDKLIREVKVITLKSKLVSDFRKDFQFYKVREINNYHHAHDAYLNAVVGTALIKKYPKLESEFVYGDYKVYDVRKMIAKSEQEIGKATAKYFFYSNIMNFFKTEITLANGEIRKRPLIETNGETGEIVWDKGRDFATVRKVLSMPQVNIVKKTEVQTGGFSKESILPKRNSDKLIARKKDWDPKKYGGFDSPTVAYSVLVVAKVEKGKSKKLKSVKELLGITIMERSSFEKNPIDFLEAKGYKEVKKDLIIKLPKYSLFELENGRKRMLASAGELQKGNELALPSKYVNFLYLASHYEKLKGSPEDNEQKQLFVEQHKHYLDEIIEQISEFSKRVILADANLDKVLSAYNKHRDKPIREQAENIIHLFTLTNLGAPAAFKYFDTTIDRKRYTSTKEVLDATLIHQSITGLYETRIDLSQLGGDGGEAAAKGGSPAPGGTVSLQDEHRLFDIPVTTSLPDVWLQDFPQAWAETGGLGRAKCQAPIIIDLKPTAVPVSIKQYPMSLEAHMGIRQHIIKFLELGVLRPCRSPWNTPLLPVKKPGTQDYRPVQDLREINKRTVDIHPTVPNPYNLLSTLKPDYSWYTVLDLKDAFFCLPLAPQSQELFAFEWKDPERGISGQLTWTRLPQGFKNSPTLFNEALHRDLTDFRTQHPEVTLLQYVDDLLLAAPTKKACTQGTRHLLQELGEKGYRASAKKAQICQTKVTYLGYILSEGKRWLTPGRIETVARIPPPRNPREVREFLGTAGFCRLWIPGFAELAAPLYALTKPSTPFTWQTEHQLAFEALKKALLSAPALGLPDTSKPFTLFLDERQGIAKGVLTQKLGPWKRPVAYLSKKLDPVAAGWPPCLRIMAATAMLVKDSAKLTLGQPLTVITPHTLEAIVRQPPDRWITNARLTHYQALLLDTDRVQFGPPVTLNPATLLPVPENQPSPHDCRQVLAETHGTREDLKDQELPDADHTWYTDGSSYLDSGTRRAGAAVVDGHNTIWAQSLPPGTSAQKAELIALTKALELSKGKKANIYTDSRYAFATAHTHGSIYERRGWLTSEGKEIKNKAEIIALLKALFLPQEVAIIHCPGHQKGQDPVAVGNRQADRVARQAAMAEVLTLATEPDNTSHITAGKRTADGSEFEKRTADGSEFESPKKKAKVE

SEQ ID NO: 7211 - protein, 2087 aa, synthetic construct
MPAAKRVKLDGGDKKYSIGLDIGTNSVGWAVITDEYKVPSKKFKVLGNTDRHSIKKNLIGALLFDSGETAEATRLKRTARRRYTRRKNRICYLQEIFSNEMAKVDDSFFHRLEESFLVEEDKKHERHPIFGNIVDEVAYHEKYPTIYHLRKKLVDSTDKADLRLIYLALAHMIKFRGHFLIEGDLNPDNSDVDKLFIQLVQTYNQLFEENPINASGVDAKAILSARLSKSRRLENLIAQLPGEKKNGLFGNLIALSLGLTPNFKSNFDLAEDAKLQLSKDTYDDDLDNLLAQIGDQYADLFLAAKNLSDAILLSDILRVNTEITKAPLSASMIKRYDEHHQDLTLLKALVRQQLPEKYKEIFFDQSKNGYAGYIDGGASQEEFYKFIKPILEKMDGTEELLVKLNREDLLRKQRTFDNGSIPHQIHLGELHAILRRQEDFYPFLKDNREKIEKILTFRIPYYVGPLARGNSRFAWMTRKSEETITPWNFEEVVDKGASAQSFIERMTNFDKNLPNEKVLPKHSLLYEYFTVYNELTKVKYVTEGMRKPAFLSGEQKKAIVDLLFKTNRKVTVKQLKEDYFKKIECFDSVEISGVEDRFNASLGTYHDLLKIIKDKDFLDNEENEDILEDIVLTLTLFEDREMIEERLKTYAHLFDDKVMKQLKRRRYTGWGRLSRKLINGIRDKQSGKTILDFLKSDGFANRNFMQLIHDDSLTFKEDIQKAQVSGQGDSLHEHIANLAGSPAIKKGILQTVKVVDELVKVMGRHKPENIVIEMARENQTTQKGQKNSRERMKRIEEGIKELGSQILKEHPVENTQLQNEKLYLYYLQNGRDMYVDQELDINRLSDYDVDHIVPQSFLKDDSIDNKVLTRSDKARGKSDNVPSEEVVKKMKNYWRQLLNAKLITQRKFDNLTKAERGGLSELDKAGFIKRQLVETRQITKHVAQILDSRMNTKYDENDKLIREVKVITLKSKLVSDFRKDFQFYKVREINNYHHAHDAYLNAVVGTALIKKYPKLESEFVYGDYKVYDVRKMIAKSEQEIGKATAKYFFYSNIMNFFKTEITLANGEIRKRPLIETNGETGEIVWDKGRDFATVRKVLSMPQVNIVKKTEVQTGGFSKESILPKRNSDKLIARKKDWDPKKYGGFDSPTVAYSVLVVAKVEKGKSKKLKSVKELLGITIMERSSFEKNPIDFLEAKGYKEVKKDLIIKLPKYSLFELENGRKRMLASAGELQKGNELALPSKYVNFLYLASHYEKLKGSPEDNEQKQLFVEQHKHYLDEIIEQISEFSKRVILADANLDKVLSAYNKHRDKPIREQAENIIHLFTLTNLGAPAAFKYFDTTIDRKRYTSTKEVLDATLIHQSITGLYETRIDLSQLGGDGGEAAAKGGSPAPGGVPWILKKPLELTIKLDLEEQQGTLLNNSILSKKGKEELKQLFEKYSALWQSWENQVGHRRIRPHKIATGTVKPTPQKQYHINPKAKPDIQIVINDLLKQGVLIQKESTMNTPVYPVPKPNGRWRMVLDYRAVNKVTPLIAVQNQHSYGILGSLFKGRYKTTIDLSNGFWAHPIVPEDYWITAFTWQGKQYCWTVLPQGFLNSPGLFNGDVVDLLQGIPNVEVYVDDVYISHDSEKEHLEYLDILFNRLKEAGYIISLKKSNIANSIVDFLGFQITNEGRGLTDTFKEKLENITAPTTLKQLQSILGLLNFARNFIPDFTELIAPLYALIPKSPKNYVPWQIEHSTTLETLITKLNGAEYLQGRKGDKTLIMKVNASYTTGYIRYYNEGEKKPISYVSIVFSKTELKFTELEKLLTTVHKGLLKALDLSMGQNIHVYSPIVSMQNIQKTPQTAKKALASRWLSWLSYLEDPRIRFFYDPQMPALKDLPAVDTGKDNKKHPSNFQHIFYTDGSAITSPTKEGHLNAGMGIVYFINKDGNLQKQQEWSISLGNHTAQFAEIAAFEFALKKCLPLGGNILVVTDSNYVAKAYNEELDVWASNGFVNNRKKPLKHISKWKSVADLKRLRPDVVVTHEPGHQKLDSSPHAYGNNLADQLATQASFKVHAGKRTADGSEFEKRTADGSEFESPKKKAKVE

SEQ ID NO: 7212 - protein, 2095 aa, synthetic construct
MPAAKRVKLDGGDKKYSIGLDIGTNSVGWAVITDEYKVPSKKFKVLGNTDRHSIKKNLIGALLFDSGETAEATRLKRTARRRYTRRKNRICYLQEIFSNEMAKVDDSFFHRLEESFLVEEDKKHERHPIFGNIVDEVAYHEKYPTIYHLRKKLVDSTDKADLRLIYLALAHMIKFRGHFLIEGDLNPDNSDVDKLFIQLVQTYNQLFEENPINASGVDAKAILSARLSKSRRLENLIAQLPGEKKNGLFGNLIALSLGLTPNFKSNFDLAEDAKLQLSKDTYDDDLDNLLAQIGDQYADLFLAAKNLSDAILLSDILRVNTEITKAPLSASMIKRYDEHHQDLTLLKALVRQQLPEKYKEIFFDQSKNGYAGYIDGGASQEEFYKFIKPILEKMDGTEELLVKLNREDLLRKQRTFDNGSIPHQIHLGELHAILRRQEDFYPFLKDNREKIEKILTFRIPYYVGPLARGNSRFAWMTRKSEETITPWNFEEVVDKGASAQSFIERMTNFDKNLPNEKVLPKHSLLYEYFTVYNELTKVKYVTEGMRKPAFLSGEQKKAIVDLLFKTNRKVTVKQLKEDYFKKIECFDSVEISGVEDRFNASLGTYHDLLKIIKDKDFLDNEENEDILEDIVLTLTLFEDREMIEERLKTYAHLFDDKVMKQLKRRRYTGWGRLSRKLINGIRDKQSGKTILDFLKSDGFANRNFMQLIHDDSLTFKEDIQKAQVSGQGDSLHEHIANLAGSPAIKKGILQTVKVVDELVKVMGRHKPENIVIEMARENQTTQKGQKNSRERMKRIEEGIKELGSQILKEHPVENTQLQNEKLYLYYLQNGRDMYVDQELDINRLSDYDVDHIVPQSFLKDDSIDNKVLTRSDKARGKSDNVPSEEVVKKMKNYWRQLLNAKLITQRKFDNLTKAERGGLSELDKAGFIKRQLVETRQITKHVAQILDSRMNTKYDENDKLIREVKVITLKSKLVSDFRKDFQFYKVREINNYHHAHDAYLNAVVGTALIKKYPKLESEFVYGDYKVYDVRKMIAKSEQEIGKATAKYFFYSNIMNFFKTEITLANGEIRKRPLIETNGETGEIVWDKGRDFATVRKVLSMPQVNIVKKTEVQTGGFSKESILPKRNSDKLIARKKDWDPKKYGGFDSPTVAYSVLVVAKVEKGKSKKLKSVKELLGITIMERSSFEKNPIDFLEAKGYKEVKKDLIIKLPKYSLFELENGRKRMLASAGELQKGNELALPSKYVNFLYLASHYEKLKGSPEDNEQKQLFVEQHKHYLDEIIEQISEFSKRVILADANLDKVLSAYNKHRDKPIREQAENIIHLFTLTNLGAPAAFKYFDTTIDRKRYTSTKEVLDATLIHQSITGLYETRIDLSQLGGDGGEAAAKGGSPAPGGTLQLEEEYRLFEPESTQKQEMDIWLKNFPQAWAETGGMGTAHCQAPVLIQLKATATPISIRQYPMPHEAYQGIKPHIRRMLDQGILKPCQSPWNTPLLPVKKPGTEDYRPVQDLREVNKRVEDIHPTVPNPYNLLSTLPPSHPWYTVLDLKDAFFCLRLHSESQLLFAFEWRDPEIGLSGQLTWTRLPQGFKNSPTLFNEALHSDLADFRVRYPALVLLQYVDDLLLAAATRTECLEGTKALLETLGNKGYRASAKKAQICLQEVTYLGYSLKDGQRWLTKARKEAILSIPVPKNSRQVREFLGKAGYCRLFIPGFAELAAPLYPLTRPGTLFQWGTEQQLAFEDIKKALLSSPALGLPDITKPFELFIDENSGFAKGVLVQKLGPWKRPVAYLSKKLDTVASGWPPCLRMVAAIAILVKDAGKLTLGQPLTILTSHPVEALVRQPPNKWLSNARMTHYQAMLLDAERVHFGPTVSLNPATLLPLPSGGNHHDCLQILAETHGTRPDLTDQPLPDADLTWYTDGSSFIRNGEREAGAAVTTESEVIWAAPLPPGTSAQRAELIALTQALKMAEGKKLTVYTDSRYAFATTHVHGEIYRRRGWLTSEGKEIKNKNEILALLEALFLPKRLSIIHCPGHQKGDSPQAKGNRLADDTAKKAATETHSSLTVLPAGKRTADGSEFEKRTADGSEFESPKKKAKVE

SEQ ID NO: 7213 - protein, 2176 aa, synthetic construct
MPAAKRVKLDGGDKKYSIGLDIGTNSVGWAVITDEYKVPSKKFKVLGNTDRHSIKKNLIGALLFDSGETAEATRLKRTARRRYTRRKNRICYLQEIFSNEMAKVDDSFFHRLEESFLVEEDKKHERHPIFGNIVDEVAYHEKYPTIYHLRKKLVDSTDKADLRLIYLALAHMIKFRGHFLIEGDLNPDNSDVDKLFIQLVQTYNQLFEENPINASGVDAKAILSARLSKSRRLENLIAQLPGEKKNGLFGNLIALSLGLTPNFKSNFDLAEDAKLQLSKDTYDDDLDNLLAQIGDQYADLFLAAKNLSDAILLSDILRVNTEITKAPLSASMIKRYDEHHQDLTLLKALVRQQLPEKYKEIFFDQSKNGYAGYIDGGASQEEFYKFIKPILEKMDGTEELLVKLNREDLLRKQRTFDNGSIPHQIHLGELHAILRRQEDFYPFLKDNREKIEKILTFRIPYYVGPLARGNSRFAWMTRKSEETITPWNFEEVVDKGASAQSFIERMTNFDKNLPNEKVLPKHSLLYEYFTVYNELTKVKYVTEGMRKPAFLSGEQKKAIVDLLFKTNRKVTVKQLKEDYFKKIECFDSVEISGVEDRFNASLGTYHDLLKIIKDKDFLDNEENEDILEDIVLTLTLFEDREMIEERLKTYAHLFDDKVMKQLKRRRYTGWGRLSRKLINGIRDKQSGKTILDFLKSDGFANRNFMQLIHDDSLTFKEDIQKAQVSGQGDSLHEHIANLAGSPAIKKGILQTVKVVDELVKVMGRHKPENIVIEMARENQTTQKGQKNSRERMKRIEEGIKELGSQILKEHPVENTQLQNEKLYLYYLQNGRDMYVDQELDINRLSDYDVDHIVPQSFLKDDSIDNKVLTRSDKARGKSDNVPSEEVVKKMKNYWRQLLNAKLITQRKFDNLTKAERGGLSELDKAGFIKRQLVETRQITKHVAQILDSRMNTKYDENDKLIREVKVITLKSKLVSDFRKDFQFYKVREINNYHHAHDAYLNAVVGTALIKKYPKLESEFVYGDYKVYDVRKMIAKSEQEIGKATAKYFFYSNIMNFFKTEITLANGEIRKRPLIETNGETGEIVWDKGRDFATVRKVLSMPQVNIVKKTEVQTGGFSKESILPKRNSDKLIARKKDWDPKKYGGFDSPTVAYSVLVVAKVEKGKSKKLKSVKELLGITIMERSSFEKNPIDFLEAKGYKEVKKDLIIKLPKYSLFELENGRKRMLASAGELQKGNELALPSKYVNFLYLASHYEKLKGSPEDNEQKQLFVEQHKHYLDEIIEQISEFSKRVILADANLDKVLSAYNKHRDKPIREQAENIIHLFTLTNLGAPAAFKYFDTTIDRKRYTSTKEVLDATLIHQSITGLYETRIDLSQLGGDGGEAAAKGGSPAPGGMNPLQLLQPLPAEIKGTKLLAHWNSGATITCIPESFLEDEQPIKKTLIKTIHGEKQQNVYYVTFKVKGRKVEAEVIASPYEYILLSPTDVPWLTQQPLQLTILVPLQEYQEKILSKTALPEDQKQQLKTLFVKYDNLWQHWENQVGHRKIRPHNIATGDYPPRPQKQYPINPKAKPSIQIVIDDLLKQGVLTPQNSTMNTPVYPVPKPDGRWRMVLDYREVNKTIPLTAAQNQHSAGILATIVRQKYKTTLDLANGFWAHPITPESYWLTAFTWQGKQYCWTRLPQGFLNSPALFNADVVDLLKEIPNVQVYVDDIYLSHDDPKEHVQQLEKVFQILLQAGYVVSLKKSEIGQKTVEFLGFNITKEGRGLTDTFKTKLLNITPPKDLKQLQSILGKLNFARNFIPNFAELVQPLYNLIAPAKGKYIEWSEENTKQLNMVIEALNTASNLEERLPEQRLVIKVNTSPSAGYVRYYNETGKKPIMYLNYVFSKAELKFSMLEKLLTTMHKALIKAMDLAMGQEILVYSPIVSMTKIQKTPLPERKALPIRWITWMTYLEDPRIQFHYDKTLPELKHIPDVYTSSQSPVKHPSQYEGVFYTDGSAIKSPDPTKSNNAGMGIVHATYKPEYQVLNQWSIPLGNHTAQMAEIAAVEFACKKALKIPGPVLVITDSFYVAESANKELPYWKSNGFVNNKKKPLKHISKWKSIAECLSMKPDITIQHEKGISLQIPVFILKGNALADKLATQGSYVVNAGKRTADGSEFEKRTADGSEFESPKKKAKVE

SEQ ID NO: 7214 - protein, 2094 aa, synthetic construct
MPAAKRVKLDGGDKKYSIGLDIGTNSVGWAVITDEYKVPSKKFKVLGNTDRHSIKKNLIGALLFDSGETAEATRLKRTARRRYTRRKNRICYLQEIFSNEMAKVDDSFFHRLEESFLVEEDKKHERHPIFGNIVDEVAYHEKYPTIYHLRKKLVDSTDKADLRLIYLALAHMIKFRGHFLIEGDLNPDNSDVDKLFIQLVQTYNQLFEENPINASGVDAKAILSARLSKSRRLENLIAQLPGEKKNGLFGNLIALSLGLTPNFKSNFDLAEDAKLQLSKDTYDDDLDNLLAQIGDQYADLFLAAKNLSDAILLSDILRVNTEITKAPLSASMIKRYDEHHQDLTLLKALVRQQLPEKYKEIFFDQSKNGYAGYIDGGASQEEFYKFIKPILEKMDGTEELLVKLNREDLLRKQRTFDNGSIPHQIHLGELHAILRRQEDFYPFLKDNREKIEKILTFRIPYYVGPLARGNSRFAWMTRKSEETITPWNFEEVVDKGASAQSFIERMTNFDKNLPNEKVLPKHSLLYEYFTVYNELTKVKYVTEGMRKPAFLSGEQKKAIVDLLFKTNRKVTVKQLKEDYFKKIECFDSVEISGVEDRFNASLGTYHDLLKIIKDKDFLDNEENEDILEDIVLTLTLFEDREMIEERLKTYAHLFDDKVMKQLKRRRYTGWGRLSRKLINGIRDKQSGKTILDFLKSDGFANRNFMQLIHDDSLTFKEDIQKAQVSGQGDSLHEHIANLAGSPAIKKGILQTVKVVDELVKVMGRHKPENIVIEMARENQTTQKGQKNSRERMKRIEEGIKELGSQILKEHPVENTQLQNEKLYLYYLQNGRDMYVDQELDINRLSDYDVDHIVPQSFLKDDSIDNKVLTRSDKARGKSDNVPSEEVVKKMKNYWRQLLNAKLITQRKFDNLTKAERGGLSELDKAGFIKRQLVETRQITKHVAQILDSRMNTKYDENDKLIREVKVITLKSKLVSDFRKDFQFYKVREINNYHHAHDAYLNAVVGTALIKKYPKLESEFVYGDYKVYDVRKMIAKSEQEIGKATAKYFFYSNIMNFFKTEITLANGEIRKRPLIETNGETGEIVWDKGRDFATVRKVLSMPQVNIVKKTEVQTGGFSKESILPKRNSDKLIARKKDWDPKKYGGFDSPTVAYSVLVVAKVEKGKSKKLKSVKELLGITIMERSSFEKNPIDFLEAKGYKEVKKDLIIKLPKYSLFELENGRKRMLASAGELQKGNELALPSKYVNFLYLASHYEKLKGSPEDNEQKQLFVEQHKHYLDEIIEQISEFSKRVILADANLDKVLSAYNKHRDKPIREQAENIIHLFTLTNLGAPAAFKYFDTTIDRKRYTSTKEVLDATLIHQSITGLYETRIDLSQLGGDGGEAAAKGGSPAPGGVLNLEEEYRLHEKPVPSSIDPSWLQLFPTVWAERAGMGLANQVPPVVVELRSGASPVAVRQYPMSKEAREGIRPHIQKFLDLGVLVPCRSPWNTPLLPVKKPGTNDYRPVQDLREINKRVQDIHPTVPNPYNLLSSLPPSYTWYSVLDLKDAFFCLRLHPNSQPLFAFEWKDPEKGNTGQLTWTRLPQGFKNSPTLFNEALHRDLAPFRALNPQVVLLQYVDDLLVAAPTYEDCKKGTQKLLQELSKLGYRVSAKKAQLCQREVTYLGYLLKEGKRWLTPARKATVMKIPVPTTPRQVREFLGTAGFCRLWIPGFASLAAPLYPLTKPSIPFIWTEEHQQAFDHIKKALLSAPALALPDLTKPFTLYIDERAGVARGVLTQTLGPWRRPVAYLSKKLDPVASGWPTCLKAVAAVALLLKDADKLTLGQNVTVIASHSLESIVRQPPDRWMTNARMTHYQSLLLNERVSFAPPAVLNPATLLPVESEATPVHRCSEILAEETGTRRDLEDQPLPGVPTWYTDGSSFITEGKRRAGAPIVDGKRTVWASSLPEGTSAQKAELVALTQALRLAEGKNINIYTDSRYAFATAHIHGAIYKQRGWLTSAGKDIKNKEEILALLEAIHLPRRVAIIHCPGHQRGSNPVATGNRRADEAAKQAALSTRVLAGTTKPAGKRTADGSEFEKRTADGSEFESPKKKAKVE

SEQ ID NO: 7215 - protein, 2127 aa, synthetic construct
MPAAKRVKLDGGDKKYSIGLDIGTNSVGWAVITDEYKVPSKKFKVLGNTDRHSIKKNLIGALLFDSGETAEATRLKRTARRRYTRRKNRICYLQEIFSNEMAKVDDSFFHRLEESFLVEEDKKHERHPIFGNIVDEVAYHEKYPTIYHLRKKLVDSTDKADLRLIYLALAHMIKFRGHFLIEGDLNPDNSDVDKLFIQLVQTYNQLFEENPINASGVDAKAILSARLSKSRRLENLIAQLPGEKKNGLFGNLIALSLGLTPNFKSNFDLAEDAKLQLSKDTYDDDLDNLLAQIGDQYADLFLAAKNLSDAILLSDILRVNTEITKAPLSASMIKRYDEHHQDLTLLKALVRQQLPEKYKEIFFDQSKNGYAGYIDGGASQEEFYKFIKPILEKMDGTEELLVKLNREDLLRKQRTFDNGSIPHQIHLGELHAILRRQEDFYPFLKDNREKIEKILTFRIPYYVGPLARGNSRFAWMTRKSEETITPWNFEEVVDKGASAQSFIERMTNFDKNLPNEKVLPKHSLLYEYFTVYNELTKVKYVTEGMRKPAFLSGEQKKAIVDLLFKTNRKVTVKQLKEDYFKKIECFDSVEISGVEDRFNASLGTYHDLLKIIKDKDFLDNEENEDILEDIVLTLTLFEDREMIEERLKTYAHLFDDKVMKQLKRRRYTGWGRLSRKLINGIRDKQSGKTILDFLKSDGFANRNFMQLIHDDSLTFKEDIQKAQVSGQGDSLHEHIANLAGSPAIKKGILQTVKVVDELVKVMGRHKPENIVIEMARENQTTQKGQKNSRERMKRIEEGIKELGSQILKEHPVENTQLQNEKLYLYYLQNGRDMYVDQELDINRLSDYDVDHIVPQSFLKDDSIDNKVLTRSDKARGKSDNVPSEEVVKKMKNYWRQLLNAKLITQRKFDNLTKAERGGLSELDKAGFIKRQLVETRQITKHVAQILDSRMNTKYDENDKLIREVKVITLKSKLVSDFRKDFQFYKVREINNYHHAHDAYLNAVVGTALIKKYPKLESEFVYGDYKVYDVRKMIAKSEQEIGKATAKYFFYSNIMNFFKTEITLANGEIRKRPLIETNGETGEIVWDKGRDFATVRKVLSMPQVNIVKKTEVQTGGFSKESILPKRNSDKLIARKKDWDPKKYGGFDSPTVAYSVLVVAKVEKGKSKKLKSVKELLGITIMERSSFEKNPIDFLEAKGYKEVKKDLIIKLPKYSLFELENGRKRMLASAGELQKGNELALPSKYVNFLYLASHYEKLKGSPEDNEQKQLFVEQHKHYLDEIIEQISEFSKRVILADANLDKVLSAYNKHRDKPIREQAENIIHLFTLTNLGAPAAFKYFDTTIDRKRYTSTKEVLDATLIHQSITGLYETRIDLSQLGGDGGEAAAKGGSPAPGGLLGRDLLTKLKAQIQFSTEGPQVTWEDRPAMCLVLNLEEEYRLHEKPVPPSIDPSWLQLFPMVWAEKAGMGLANQVPPVVVELKSDASPVAVRQYPMSKEAREGIRPHIQRFLDLGILVPCQSPWNTPLLPVKKPGTNDYRPVQDLREVNKRVQDIHPTVPNPYNLLSSLPPSHTWYSVLDLKDAFFCLKLHPNSQPLFAFEWRDPEKGNTGQLTWTRLPQGFKNSPTLFNEALHRDLASFRALNPQVVMLQYVDDLLVAAPTYRDCKEGTRRLLQELSKLGYRVSAKKAQLCREEVTYLGYLLKGGKRWLTPARKATVMKIPTPTTPRQVREFLGTAGFCRLWIPGFASLAAPLYPLTRPKVPFTWTEAHQEAFGRIKEALLSAPALALPDLTKPFALYVDEKEGVARGVLTQTLGPWRRPVAYLSKKLDPVASGWPTCLKAIAAVALLLKDADKLTLGQNVLVIAPHNLESIVRQPPDRWMTNARMTHYQSLLLNERVSFAPPAILNPATLLPVESDDTPIHICSEILAEETGTRPDLRDQPLPGVPAWYTDGSSFIMDGRRQAGAAIVDNKRTVWASNLPEGTSAQKAELIALTQALRLAEGKSINIYTDSRYAFATAHVHGAIYKQRGWLTSAGKDIKNKEEILALLEAIHLPKRVAIIHCPGHQRGTDPVATGNRKADEAAKQAAQSTRILTETTKNAGKRTADGSEFEKRTADGSEFESPKKKAKVE

SEQ ID NO: 7216 - protein, 2127 aa, synthetic construct
MPAAKRVKLDGGDKKYSIGLDIGTNSVGWAVITDEYKVPSKKFKVLGNTDRHSIKKNLIGALLFDSGETAEATRLKRTARRRYTRRKNRICYLQEIFSNEMAKVDDSFFHRLEESFLVEEDKKHERHPIFGNIVDEVAYHEKYPTIYHLRKKLVDSTDKADLRLIYLALAHMIKFRGHFLIEGDLNPDNSDVDKLFIQLVQTYNQLFEENPINASGVDAKAILSARLSKSRRLENLIAQLPGEKKNGLFGNLIALSLGLTPNFKSNFDLAEDAKLQLSKDTYDDDLDNLLAQIGDQYADLFLAAKNLSDAILLSDILRVNTEITKAPLSASMIKRYDEHHQDLTLLKALVRQQLPEKYKEIFFDQSKNGYAGYIDGGASQEEFYKFIKPILEKMDGTEELLVKLNREDLLRKQRTFDNGSIPHQIHLGELHAILRRQEDFYPFLKDNREKIEKILTFRIPYYVGPLARGNSRFAWMTRKSEETITPWNFEEVVDKGASAQSFIERMTNFDKNLPNEKVLPKHSLLYEYFTVYNELTKVKYVTEGMRKPAFLSGEQKKAIVDLLFKTNRKVTVKQLKEDYFKKIECFDSVEISGVEDRFNASLGTYHDLLKIIKDKDFLDNEENEDILEDIVLTLTLFEDREMIEERLKTYAHLFDDKVMKQLKRRRYTGWGRLSRKLINGIRDKQSGKTILDFLKSDGFANRNFMQLIHDDSLTFKEDIQKAQVSGQGDSLHEHIANLAGSPAIKKGILQTVKVVDELVKVMGRHKPENIVIEMARENQTTQKGQKNSRERMKRIEEGIKELGSQILKEHPVENTQLQNEKLYLYYLQNGRDMYVDQELDINRLSDYDVDHIVPQSFLKDDSIDNKVLTRSDKARGKSDNVPSEEVVKKMKNYWRQLLNAKLITQRKFDNLTKAERGGLSELDKAGFIKRQLVETRQITKHVAQILDSRMNTKYDENDKLIREVKVITLKSKLVSDFRKDFQFYKVREINNYHHAHDAYLNAVVGTALIKKYPKLESEFVYGDYKVYDVRKMIAKSEQEIGKATAKYFFYSNIMNFFKTEITLANGEIRKRPLIETNGETGEIVWDKGRDFATVRKVLSMPQVNIVKKTEVQTGGFSKESILPKRNSDKLIARKKDWDPKKYGGFDSPTVAYSVLVVAKVEKGKSKKLKSVKELLGITIMERSSFEKNPIDFLEAKGYKEVKKDLIIKLPKYSLFELENGRKRMLASAGELQKGNELALPSKYVNFLYLASHYEKLKGSPEDNEQKQLFVEQHKHYLDEIIEQISEFSKRVILADANLDKVLSAYNKHRDKPIREQAENIIHLFTLTNLGAPAAFKYFDTTIDRKRYTSTKEVLDATLIHQSITGLYETRIDLSQLGGDGGEAAAKGGSPAPGGLLGRDLLTKLKAQIQFSTEGPQVTWEDRPAMCLVLNLEEEYRLHEKPVPPSIDPSWLQLFPMVWAEKAGMGLANQVPPVVVELKSDASPVAVRQYPMSKEAREGIRPHIQRFLDLGILVPCQSPWNTPLLPVKKPGTNDYRPVQDLREVNKRVQDIHPTVPNPYNLLSSLPPSHTWYSVLDLKDAFFCLKLHPNSQPLFAFEWRDPEKGNTGQLTWTRLPQGFKNSPTLFNEALHRDLASFRALNPQVVMLQYVDDLLVAAPTYRDCKEGTRRLLQELSKLGYRVSAKKAQLCREEVTYLGYLLKGGKRWLTPARKATVMKIPTPTTPRQVREFLGKAGFCRLFIPGFASLAAPLYPLTRPKVPFTWTEAHQEAFGRIKEALLSAPALALPDLTKPFALYVDEKEGVARGVLTQTLGPWRRPVAYLSKKLDPVASGWPTCLKAIAAVALLLKDADKLTLGQNVLVIAPHNLESIVRQPPDRWMTNARMTHYQSLLLNERVSFAPPAILNPATLLPVESDDTPIHICSEILAEETGTRPDLRDQPLPGVPAWYTDGSSFIMDGRRQAGAAIVDNKRTVWASNLPEGTSAQKAELIALTQALRLAEGKSINIYTDSRYAFATAHVHGAIYKQRGWLTSAGKDIKNKEEILALLEAIHLPKRVAIIHCPGHQRGTDPVATGNRKADEAAKQAAQSTRILTETTKNAGKRTADGSEFEKRTADGSEFESPKKKAKVE

SEQ ID NO: 7217 - protein, 2218 aa, synthetic construct
MPAAKRVKLDGGDKKYSIGLDIGTNSVGWAVITDEYKVPSKKFKVLGNTDRHSIKKNLIGALLFDSGETAEATRLKRTARRRYTRRKNRICYLQEIFSNEMAKVDDSFFHRLEESFLVEEDKKHERHPIFGNIVDEVAYHEKYPTIYHLRKKLVDSTDKADLRLIYLALAHMIKFRGHFLIEGDLNPDNSDVDKLFIQLVQTYNQLFEENPINASGVDAKAILSARLSKSRRLENLIAQLPGEKKNGLFGNLIALSLGLTPNFKSNFDLAEDAKLQLSKDTYDDDLDNLLAQIGDQYADLFLAAKNLSDAILLSDILRVNTEITKAPLSASMIKRYDEHHQDLTLLKALVRQQLPEKYKEIFFDQSKNGYAGYIDGGASQEEFYKFIKPILEKMDGTEELLVKLNREDLLRKQRTFDNGSIPHQIHLGELHAILRRQEDFYPFLKDNREKIEKILTFRIPYYVGPLARGNSRFAWMTRKSEETITPWNFEEVVDKGASAQSFIERMTNFDKNLPNEKVLPKHSLLYEYFTVYNELTKVKYVTEGMRKPAFLSGEQKKAIVDLLFKTNRKVTVKQLKEDYFKKIECFDSVEISGVEDRFNASLGTYHDLLKIIKDKDFLDNEENEDILEDIVLTLTLFEDREMIEERLKTYAHLFDDKVMKQLKRRRYTGWGRLSRKLINGIRDKQSGKTILDFLKSDGFANRNFMQLIHDDSLTFKEDIQKAQVSGQGDSLHEHIANLAGSPAIKKGILQTVKVVDELVKVMGRHKPENIVIEMARENQTTQKGQKNSRERMKRIEEGIKELGSQILKEHPVENTQLQNEKLYLYYLQNGRDMYVDQELDINRLSDYDVDHIVPQSFLKDDSIDNKVLTRSDKARGKSDNVPSEEVVKKMKNYWRQLLNAKLITQRKFDNLTKAERGGLSELDKAGFIKRQLVETRQITKHVAQILDSRMNTKYDENDKLIREVKVITLKSKLVSDFRKDFQFYKVREINNYHHAHDAYLNAVVGTALIKKYPKLESEFVYGDYKVYDVRKMIAKSEQEIGKATAKYFFYSNIMNFFKTEITLANGEIRKRPLIETNGETGEIVWDKGRDFATVRKVLSMPQVNIVKKTEVQTGGFSKESILPKRNSDKLIARKKDWDPKKYGGFDSPTVAYSVLVVAKVEKGKSKKLKSVKELLGITIMERSSFEKNPIDFLEAKGYKEVKKDLIIKLPKYSLFELENGRKRMLASAGELQKGNELALPSKYVNFLYLASHYEKLKGSPEDNEQKQLFVEQHKHYLDEIIEQISEFSKRVILADANLDKVLSAYNKHRDKPIREQAENIIHLFTLTNLGAPAAFKYFDTTIDRKRYTSTKEVLDATLIHQSITGLYETRIDLSQLGGDGGEAAAKGGSPAPGGTLGDQGSRGSDPLPEPRVTLTVEGIPTEFLVNTGAEHSVLTKPMGKMGSKRTVVAGATGSKVYPWTTKRLLKIGQKQVTHSFLVIPECPAPLLGRDLLTKLKAQIQFSTEGPQVTWEDRPAMCLVLNLEEEYRLHEKPVPPSIDPSWLQLFPMVWAEKAGMGLANQVPPVVVELKSDASPVAVRQYPMSKEAREGIRPHIQRFLDLGILVPCQSPWNTPLLPVKKPGTNDYRPVQDLREVNKRVQDIHPTVPNPYNLLSSLPPSHTWYSVLDLKDAFFCLKLHPNSQPLFAFEWRDPEKGNTGQLTWTRLPQGFKNSPTLFNEALHRDLASFRALNPQVVMLQYVDDLLVAAPTYRDCKEGTRRLLQELSKLGYRVSAKKAQLCREEVTYLGYLLKGGKRWLTPARKATVMKIPTPTTPRQVREFLGTAGFCRLWIPGFASLAAPLYPLTRPKVPFTWTEAHQEAFGRIKEALLSAPALALPDLTKPFALYVDEKEGVARGVLTQTLGPWRRPVAYLSKKLDPVASGWPTCLKAIAAVALLLKDADKLTLGQNVLVIAPHNLESIVRQPPDRWMTNARMTHYQSLLLNERVSFAPPAILNPATLLPVESDDTPIHICSEILAEETGTRPDLRDQPLPGVPAWYTDGSSFIMDGRRQAGAAIVDNKRTVWASNLPEGTSAQKAELIALTQALRLAEGKSINIYTDSRYAFATAHVHGAIYKQRGWLTSAGKDIKNKEEILALLEAIHLPKRVAIIHCPGHQRGTDPVATGNRKADEAAKQAAQSTRILTETTKNAGKRTADGSEFEKRTADGSEFESPKKKAKVE

SEQ ID NO: 7218 - protein, 2096 aa, synthetic construct
MPAAKRVKLDGGDKKYSIGLDIGTNSVGWAVITDEYKVPSKKFKVLGNTDRHSIKKNLIGALLFDSGETAEATRLKRTARRRYTRRKNRICYLQEIFSNEMAKVDDSFFHRLEESFLVEEDKKHERHPIFGNIVDEVAYHEKYPTIYHLRKKLVDSTDKADLRLIYLALAHMIKFRGHFLIEGDLNPDNSDVDKLFIQLVQTYNQLFEENPINASGVDAKAILSARLSKSRRLENLIAQLPGEKKNGLFGNLIALSLGLTPNFKSNFDLAEDAKLQLSKDTYDDDLDNLLAQIGDQYADLFLAAKNLSDAILLSDILRVNTEITKAPLSASMIKRYDEHHQDLTLLKALVRQQLPEKYKEIFFDQSKNGYAGYIDGGASQEEFYKFIKPILEKMDGTEELLVKLNREDLLRKQRTFDNGSIPHQIHLGELHAILRRQEDFYPFLKDNREKIEKILTFRIPYYVGPLARGNSRFAWMTRKSEETITPWNFEEVVDKGASAQSFIERMTNFDKNLPNEKVLPKHSLLYEYFTVYNELTKVKYVTEGMRKPAFLSGEQKKAIVDLLFKTNRKVTVKQLKEDYFKKIECFDSVEISGVEDRFNASLGTYHDLLKIIKDKDFLDNEENEDILEDIVLTLTLFEDREMIEERLKTYAHLFDDKVMKQLKRRRYTGWGRLSRKLINGIRDKQSGKTILDFLKSDGFANRNFMQLIHDDSLTFKEDIQKAQVSGQGDSLHEHIANLAGSPAIKKGILQTVKVVDELVKVMGRHKPENIVIEMARENQTTQKGQKNSRERMKRIEEGIKELGSQILKEHPVENTQLQNEKLYLYYLQNGRDMYVDQELDINRLSDYDVDHIVPQSFLKDDSIDNKVLTRSDKARGKSDNVPSEEVVKKMKNYWRQLLNAKLITQRKFDNLTKAERGGLSELDKAGFIKRQLVETRQITKHVAQILDSRMNTKYDENDKLIREVKVITLKSKLVSDFRKDFQFYKVREINNYHHAHDAYLNAVVGTALIKKYPKLESEFVYGDYKVYDVRKMIAKSEQEIGKATAKYFFYSNIMNFFKTEITLANGEIRKRPLIETNGETGEIVWDKGRDFATVRKVLSMPQVNIVKKTEVQTGGFSKESILPKRNSDKLIARKKDWDPKKYGGFDSPTVAYSVLVVAKVEKGKSKKLKSVKELLGITIMERSSFEKNPIDFLEAKGYKEVKKDLIIKLPKYSLFELENGRKRMLASAGELQKGNELALPSKYVNFLYLASHYEKLKGSPEDNEQKQLFVEQHKHYLDEIIEQISEFSKRVILADANLDKVLSAYNKHRDKPIREQAENIIHLFTLTNLGAPAAFKYFDTTIDRKRYTSTKEVLDATLIHQSITGLYETRIDLSQLGGDGGEAAAKGGSPAPGGTLNLEDEYRLYETSAEPEVSPGSTWLSDFPQAWAETGGMGLAVRQAPLIIPLKATSTPVSIKQYPMSQEAKLGIKPHIQRLLDQGILVPCQSPWNTPLLPVKKPGTNDYRPVQDLREVNKRVEDIHPTVPNPYNLLSGLPPSHRWYTVLDLKDAFFCLRLHPTSQPLFAFEWRDPGMGISGQLTWTRLPQGFKNSPTLFNEALHRDLADFRIQHPDLILLQYVDDILLAATSELDCQQGTRALLLTLGNLGYRASAKKAQLCQKQVKYLGYLLKEGQRWLTEARKETVMGQPTPKTPRQLREFLGTAGFCRLWIPGFAEMAAPLYPLTKPGTLFNWGPDQQKAYQEIKQALLTAPALGLPDLTKPFELFVDEKQGYAKGVLTQKLGPWRRPVAYLSKKLDPVAAGWPPCLRMVAAIAVLRKDAGKLTMGQPLVILAPHAVEALVKQPPDRWLSNARMTHYQAMLLDTDRVQFGPVVALNPATLLPLPEEGAPHDCLEILAETHGTRPDLTDQPIPDADHTWYTDGSSFLQEGQRKAGAAVTTETEVIWARALPAGTSAQRAELIALTQALKMAEGKRLNVYTDSRYAFATAHIHGEIYRRRGWLTSEGREIKNKSEILALLKALFLPKRLSIIHCLGHQKGDSAEARGNRLADQAAREAAIKTPPDTSTLLAGKRTADGSEFEKRTADGSEFESPKKKAKVE

SEQ ID NO: 7219 - protein, 2096 aa, synthetic construct
MPAAKRVKLDGGDKKYSIGLDIGTNSVGWAVITDEYKVPSKKFKVLGNTDRHSIKKNLIGALLFDSGETAEATRLKRTARRRYTRRKNRICYLQEIFSNEMAKVDDSFFHRLEESFLVEEDKKHERHPIFGNIVDEVAYHEKYPTIYHLRKKLVDSTDKADLRLIYLALAHMIKFRGHFLIEGDLNPDNSDVDKLFIQLVQTYNQLFEENPINASGVDAKAILSARLSKSRRLENLIAQLPGEKKNGLFGNLIALSLGLTPNFKSNFDLAEDAKLQLSKDTYDDDLDNLLAQIGDQYADLFLAAKNLSDAILLSDILRVNTEITKAPLSASMIKRYDEHHQDLTLLKALVRQQLPEKYKEIFFDQSKNGYAGYIDGGASQEEFYKFIKPILEKMDGTEELLVKLNREDLLRKQRTFDNGSIPHQIHLGELHAILRRQEDFYPFLKDNREKIEKILTFRIPYYVGPLARGNSRFAWMTRKSEETITPWNFEEVVDKGASAQSFIERMTNFDKNLPNEKVLPKHSLLYEYFTVYNELTKVKYVTEGMRKPAFLSGEQKKAIVDLLFKTNRKVTVKQLKEDYFKKIECFDSVEISGVEDRFNASLGTYHDLLKIIKDKDFLDNEENEDILEDIVLTLTLFEDREMIEERLKTYAHLFDDKVMKQLKRRRYTGWGRLSRKLINGIRDKQSGKTILDFLKSDGFANRNFMQLIHDDSLTFKEDIQKAQVSGQGDSLHEHIANLAGSPAIKKGILQTVKVVDELVKVMGRHKPENIVIEMARENQTTQKGQKNSRERMKRIEEGIKELGSQILKEHPVENTQLQNEKLYLYYLQNGRDMYVDQELDINRLSDYDVDHIVPQSFLKDDSIDNKVLTRSDKARGKSDNVPSEEVVKKMKNYWRQLLNAKLITQRKFDNLTKAERGGLSELDKAGFIKRQLVETRQITKHVAQILDSRMNTKYDENDKLIREVKVITLKSKLVSDFRKDFQFYKVREINNYHHAHDAYLNAVVGTALIKKYPKLESEFVYGDYKVYDVRKMIAKSEQEIGKATAKYFFYSNIMNFFKTEITLANGEIRKRPLIETNGETGEIVWDKGRDFATVRKVLSMPQVNIVKKTEVQTGGFSKESILPKRNSDKLIARKKDWDPKKYGGFDSPTVAYSVLVVAKVEKGKSKKLKSVKELLGITIMERSSFEKNPIDFLEAKGYKEVKKDLIIKLPKYSLFELENGRKRMLASAGELQKGNELALPSKYVNFLYLASHYEKLKGSPEDNEQKQLFVEQHKHYLDEIIEQISEFSKRVILADANLDKVLSAYNKHRDKPIREQAENIIHLFTLTNLGAPAAFKYFDTTIDRKRYTSTKEVLDATLIHQSITGLYETRIDLSQLGGDGGEAAAKGGSPAPGGTLNLEDEYRLYETSAEPEVSPGSTWLSDFPQAWAETGGMGLAVRQAPLIIPLKATSTPVSIKQYPMSQEAKLGIKPHIQRLLDQGILVPCQSPWNTPLLPVKKPGTNDYRPVQDLREVNKRVEDIHPTVPNPYNLLSGLPPSHRWYTVLDLKDAFFCLRLHPTSQPLFAFEWRDPGMGISGQLTWTRLPQGFKNSPTLFNEALHRDLADFRIQHPDLILLQYVDDILLAATSELDCQQGTRALLLTLGNLGYRASAKKAQLCQKQVKYLGYLLKEGQRWLTEARKETVMGQPTPKTPRQLREFLGKAGFCRLFIPGFAEMAAPLYPLTKPGTLFNWGPDQQKAYQEIKQALLTAPALGLPDLTKPFELFVDEKQGYAKGVLTQKLGPWRRPVAYLSKKLDPVAAGWPPCLRMVAAIAVLRKDAGKLTMGQPLVILAPHAVEALVKQPPDRWLSNARMTHYQAMLLDTDRVQFGPVVALNPATLLPLPEEGAPHDCLEILAETHGTRPDLTDQPIPDADHTWYTDGSSFLQEGQRKAGAAVTTETEVIWARALPAGTSAQRAELIALTQALKMAEGKRLNVYTDSRYAFATAHIHGEIYRRRGWLTSEGREIKNKSEILALLKALFLPKRLSIIHCLGHQKGDSAEARGNRLADQAAREAAIKTPPDTSTLLAGKRTADGSEFEKRTADGSEFESPKKKAKVE

SEQ ID NO: 7220 - protein, 2096 aa, synthetic construct
MPAAKRVKLDGGDKKYSIGLDIGTNSVGWAVITDEYKVPSKKFKVLGNTDRHSIKKNLIGALLFDSGETAEATRLKRTARRRYTRRKNRICYLQEIFSNEMAKVDDSFFHRLEESFLVEEDKKHERHPIFGNIVDEVAYHEKYPTIYHLRKKLVDSTDKADLRLIYLALAHMIKFRGHFLIEGDLNPDNSDVDKLFIQLVQTYNQLFEENPINASGVDAKAILSARLSKSRRLENLIAQLPGEKKNGLFGNLIALSLGLTPNFKSNFDLAEDAKLQLSKDTYDDDLDNLLAQIGDQYADLFLAAKNLSDAILLSDILRVNTEITKAPLSASMIKRYDEHHQDLTLLKALVRQQLPEKYKEIFFDQSKNGYAGYIDGGASQEEFYKFIKPILEKMDGTEELLVKLNREDLLRKQRTFDNGSIPHQIHLGELHAILRRQEDFYPFLKDNREKIEKILTFRIPYYVGPLARGNSRFAWMTRKSEETITPWNFEEVVDKGASAQSFIERMTNFDKNLPNEKVLPKHSLLYEYFTVYNELTKVKYVTEGMRKPAFLSGEQKKAIVDLLFKTNRKVTVKQLKEDYFKKIECFDSVEISGVEDRFNASLGTYHDLLKIIKDKDFLDNEENEDILEDIVLTLTLFEDREMIEERLKTYAHLFDDKVMKQLKRRRYTGWGRLSRKLINGIRDKQSGKTILDFLKSDGFANRNFMQLIHDDSLTFKEDIQKAQVSGQGDSLHEHIANLAGSPAIKKGILQTVKVVDELVKVMGRHKPENIVIEMARENQTTQKGQKNSRERMKRIEEGIKELGSQILKEHPVENTQLQNEKLYLYYLQNGRDMYVDQELDINRLSDYDVDHIVPQSFLKDDSIDNKVLTRSDKARGKSDNVPSEEVVKKMKNYWRQLLNAKLITQRKFDNLTKAERGGLSELDKAGFIKRQLVETRQITKHVAQILDSRMNTKYDENDKLIREVKVITLKSKLVSDFRKDFQFYKVREINNYHHAHDAYLNAVVGTALIKKYPKLESEFVYGDYKVYDVRKMIAKSEQEIGKATAKYFFYSNIMNFFKTEITLANGEIRKRPLIETNGETGEIVWDKGRDFATVRKVLSMPQVNIVKKTEVQTGGFSKESILPKRNSDKLIARKKDWDPKKYGGFDSPTVAYSVLVVAKVEKGKSKKLKSVKELLGITIMERSSFEKNPIDFLEAKGYKEVKKDLIIKLPKYSLFELENGRKRMLASAGELQKGNELALPSKYVNFLYLASHYEKLKGSPEDNEQKQLFVEQHKHYLDEIIEQISEFSKRVILADANLDKVLSAYNKHRDKPIREQAENIIHLFTLTNLGAPAAFKYFDTTIDRKRYTSTKEVLDATLIHQSITGLYETRIDLSQLGGDGGEAAAKGGSPAPGGTLGIEDEYRLHETSTEPDVSLGSTWLSDFPQAWAETGGMGLAVRQAPLIIPLKATSTPVSIQQYPMSHEARLGIKPHIQRLLDQGILVPCQSPWNTPLLPVKKPGTNDYRPVQDLREVNKRVEDIHPTVPNPYNLLSGLPPSHQWYTVLDLKDAFFCLRLHPTSQPLFAFEWRDPGMGISGQLTWTRLPQGFKNSPTLFNEALHRDLADFRIQHPDLILLQYVDDILLAATSELDCQQGTRALLQTLGDLGYRASAKKAQICQKQVKYLGYLLREGQRWLTEARKETVMGQPVPKTPRQLREFLGTAGFCRLWIPGFAEMAAPLYPLTKPGTLFSWGPDQQKAYQEIKQALLTAPALGLPDLTKPFELFVDEKQGYAKGVLTQKLGPWRRPVAYLSKKLDPVAAGWPPCLRMVAAIAVLTKDAGKLTMGQPLVILAPHAVEALVKQPPDRWLSNARMTHYQAMLLDTDRVQFGPVVALNPATLLPLPEEGAPHDCLEILAETHGTRPDLTDQPIPDADHTWYTDGSSFLQEGQRKAGAAVTTETEVIWAGALPAGTSAQRAELIALTQALKMAEGKRLNVYTDSRYAFATAHIHGEIYRRRGWLTSEGREIKNKSEILALLKALFLPKRLSIIHCLGHQKGDSAEARGNRLADQAAREAAIKTPPDTSTLLAGKRTADGSEFEKRTADGSEFESPKKKAKVE

SEQ ID NO: 7221 - protein, 2096 aa, synthetic construct
MPAAKRVKLDGGDKKYSIGLDIGTNSVGWAVITDEYKVPSKKFKVLGNTDRHSIKKNLIGALLFDSGETAEATRLKRTARRRYTRRKNRICYLQEIFSNEMAKVDDSFFHRLEESFLVEEDKKHERHPIFGNIVDEVAYHEKYPTIYHLRKKLVDSTDKADLRLIYLALAHMIKFRGHFLIEGDLNPDNSDVDKLFIQLVQTYNQLFEENPINASGVDAKAILSARLSKSRRLENLIAQLPGEKKNGLFGNLIALSLGLTPNFKSNFDLAEDAKLQLSKDTYDDDLDNLLAQIGDQYADLFLAAKNLSDAILLSDILRVNTEITKAPLSASMIKRYDEHHQDLTLLKALVRQQLPEKYKEIFFDQSKNGYAGYIDGGASQEEFYKFIKPILEKMDGTEELLVKLNREDLLRKQRTFDNGSIPHQIHLGELHAILRRQEDFYPFLKDNREKIEKILTFRIPYYVGPLARGNSRFAWMTRKSEETITPWNFEEVVDKGASAQSFIERMTNFDKNLPNEKVLPKHSLLYEYFTVYNELTKVKYVTEGMRKPAFLSGEQKKAIVDLLFKTNRKVTVKQLKEDYFKKIECFDSVEISGVEDRFNASLGTYHDLLKIIKDKDFLDNEENEDILEDIVLTLTLFEDREMIEERLKTYAHLFDDKVMKQLKRRRYTGWGRLSRKLINGIRDKQSGKTILDFLKSDGFANRNFMQLIHDDSLTFKEDIQKAQVSGQGDSLHEHIANLAGSPAIKKGILQTVKVVDELVKVMGRHKPENIVIEMARENQTTQKGQKNSRERMKRIEEGIKELGSQILKEHPVENTQLQNEKLYLYYLQNGRDMYVDQELDINRLSDYDVDHIVPQSFLKDDSIDNKVLTRSDKARGKSDNVPSEEVVKKMKNYWRQLLNAKLITQRKFDNLTKAERGGLSELDKAGFIKRQLVETRQITKHVAQILDSRMNTKYDENDKLIREVKVITLKSKLVSDFRKDFQFYKVREINNYHHAHDAYLNAVVGTALIKKYPKLESEFVYGDYKVYDVRKMIAKSEQEIGKATAKYFFYSNIMNFFKTEITLANGEIRKRPLIETNGETGEIVWDKGRDFATVRKVLSMPQVNIVKKTEVQTGGFSKESILPKRNSDKLIARKKDWDPKKYGGFDSPTVAYSVLVVAKVEKGKSKKLKSVKELLGITIMERSSFEKNPIDFLEAKGYKEVKKDLIIKLPKYSLFELENGRKRMLASAGELQKGNELALPSKYVNFLYLASHYEKLKGSPEDNEQKQLFVEQHKHYLDEIIEQISEFSKRVILADANLDKVLSAYNKHRDKPIREQAENIIHLFTLTNLGAPAAFKYFDTTIDRKRYTSTKEVLDATLIHQSITGLYETRIDLSQLGGDGGEAAAKGGSPAPGGTLNIEDEYRLHETSKGPDVPLGSTWLSDFPQAWAETGGMGLAVRQAPLIIPLKATSTPVSIKQYPMSQEARLGIKPHIQRLLDQGILVPCQSPWNTPLLPVKKPGTNDYRPVQDLREVNKRVEDIHPTVPNPYNLLSGLPPSHQWYTVLDLKDAFFCLRLHPTSQSLFAFEWRDPEMGISGQLTWTRLPQGFKNSPTLFDEALHRDLADFRIQHPDLILLQYVDDLLLAATSELDCQQGTRALLQTLGDLGYRASAKKAQICQKQVKYLGYLLKEGQRWLTEARKETVMGQPTPKTPRQLREFLGTAGFCRLWIPGFAEMAAPLYPLTKTGTLFEWGPDQQKAYQEIKQALLTAPALGLPDLTKPFELFVDEKQGYAKGVLTQKLGPWRRPVAYLSKKLDPVAAGWPPCLRMVAAIAVLTKDAGKLTMGQPLVILAPHAVEALVKQPPDRWLSNARMTHYQALLLDTDRVQFGPIVALNPATLLPLPEEGLQHDCLDILAEAHGTRPDLTDQPLPDADHTWYTDGSSFLQEGQRKAGAAVTTETEVVWAKALPAGTSAQRAELIALTQALKMAEGKKLNVYTDSRYAFATAHIHGEIYRRRGLLTSEGKEIKNKDEILALLKALFLPKRLSIIHCPGHQKGNRAEARGNRMADQAAREVATRETPETSTLLAGKRTADGSEFEKRTADGSEFESPKKKAKVE

SEQ ID NO: 7222 - protein, 2096 aa, synthetic construct
MPAAKRVKLDGGDKKYSIGLDIGTNSVGWAVITDEYKVPSKKFKVLGNTDRHSIKKNLIGALLFDSGETAEATRLKRTARRRYTRRKNRICYLQEIFSNEMAKVDDSFFHRLEESFLVEEDKKHERHPIFGNIVDEVAYHEKYPTIYHLRKKLVDSTDKADLRLIYLALAHMIKFRGHFLIEGDLNPDNSDVDKLFIQLVQTYNQLFEENPINASGVDAKAILSARLSKSRRLENLIAQLPGEKKNGLFGNLIALSLGLTPNFKSNFDLAEDAKLQLSKDTYDDDLDNLLAQIGDQYADLFLAAKNLSDAILLSDILRVNTEITKAPLSASMIKRYDEHHQDLTLLKALVRQQLPEKYKEIFFDQSKNGYAGYIDGGASQEEFYKFIKPILEKMDGTEELLVKLNREDLLRKQRTFDNGSIPHQIHLGELHAILRRQEDFYPFLKDNREKIEKILTFRIPYYVGPLARGNSRFAWMTRKSEETITPWNFEEVVDKGASAQSFIERMTNFDKNLPNEKVLPKHSLLYEYFTVYNELTKVKYVTEGMRKPAFLSGEQKKAIVDLLFKTNRKVTVKQLKEDYFKKIECFDSVEISGVEDRFNASLGTYHDLLKIIKDKDFLDNEENEDILEDIVLTLTLFEDREMIEERLKTYAHLFDDKVMKQLKRRRYTGWGRLSRKLINGIRDKQSGKTILDFLKSDGFANRNFMQLIHDDSLTFKEDIQKAQVSGQGDSLHEHIANLAGSPAIKKGILQTVKVVDELVKVMGRHKPENIVIEMARENQTTQKGQKNSRERMKRIEEGIKELGSQILKEHPVENTQLQNEKLYLYYLQNGRDMYVDQELDINRLSDYDVDHIVPQSFLKDDSIDNKVLTRSDKARGKSDNVPSEEVVKKMKNYWRQLLNAKLITQRKFDNLTKAERGGLSELDKAGFIKRQLVETRQITKHVAQILDSRMNTKYDENDKLIREVKVITLKSKLVSDFRKDFQFYKVREINNYHHAHDAYLNAVVGTALIKKYPKLESEFVYGDYKVYDVRKMIAKSEQEIGKATAKYFFYSNIMNFFKTEITLANGEIRKRPLIETNGETGEIVWDKGRDFATVRKVLSMPQVNIVKKTEVQTGGFSKESILPKRNSDKLIARKKDWDPKKYGGFDSPTVAYSVLVVAKVEKGKSKKLKSVKELLGITIMERSSFEKNPIDFLEAKGYKEVKKDLIIKLPKYSLFELENGRKRMLASAGELQKGNELALPSKYVNFLYLASHYEKLKGSPEDNEQKQLFVEQHKHYLDEIIEQISEFSKRVILADANLDKVLSAYNKHRDKPIREQAENIIHLFTLTNLGAPAAFKYFDTTIDRKRYTSTKEVLDATLIHQSITGLYETRIDLSQLGGDGGEAAAKGGSPAPGGTLNIEDEYRLHETSKGPDVPLGSTWLSDFPQAWAETGGMGLAVRQAPLIIPLKATSTPVSIKQYPMSQEARLGIKPHIQRLLDQGILVPCQSPWNTPLLPVKKPGTNDYRPVQDLREVNKRVEDIHPTVPNPYNLLSGLPPSHQWYTVLDLKDAFFCLRLHPTSQSLFAFEWRDPEMGISGQLTWTRLPQGFKNSPTLFNEALHRDLADFRIQHPDLILLQYVDDLLLAATSELDCQQGTRALLQTLGDLGYRASAKKAQICQKQVKYLGYLLKEGQRWLTEARKETVMGQPTPKTPRQLREFLGKAGFCRLFIPGFAEMAAPLYPLTKPGTLFEWGPDQQKAYQEIKQALLTAPALGLPDLTKPFELFVDEKQGYAKGVLTQKLGPWRRPVAYLSKKLDPVAAGWPPCLRMVAAIAVLTKDAGKLTMGQPLVILAPHAVEALVKQPPDRWLSNARMTHYQALLLDTDRVQFGPIVALNPATLLPLPEEGLQHDCLDILAEAHGTRPDLTDQPLPDADHTWYTDGSSFLQEGQRKAGAAVTTETEVVWAKALPAGTSAQRAELIALTQALKMAEGKKLNVYTDSRYAFATAHIHGEIYRRRGWLTSEGKEIKNKDEILALLKALFLPKRLSIIHCPGHQKGNRAEARGNRMADQAAREVATRETPETSTLLAGKRTADGSEFEKRTADGSEFESPKKKAKVE

SEQ ID NO: 7223 - protein, 2087 aa, synthetic construct
MPAAKRVKLDGGDKKYSIGLDIGTNSVGWAVITDEYKVPSKKFKVLGNTDRHSIKKNLIGALLFDSGETAEATRLKRTARRRYTRRKNRICYLQEIFSNEMAKVDDSFFHRLEESFLVEEDKKHERHPIFGNIVDEVAYHEKYPTIYHLRKKLVDSTDKADLRLIYLALAHMIKFRGHFLIEGDLNPDNSDVDKLFIQLVQTYNQLFEENPINASGVDAKAILSARLSKSRRLENLIAQLPGEKKNGLFGNLIALSLGLTPNFKSNFDLAEDAKLQLSKDTYDDDLDNLLAQIGDQYADLFLAAKNLSDAILLSDILRVNTEITKAPLSASMIKRYDEHHQDLTLLKALVRQQLPEKYKEIFFDQSKNGYAGYIDGGASQEEFYKFIKPILEKMDGTEELLVKLNREDLLRKQRTFDNGSIPHQIHLGELHAILRRQEDFYPFLKDNREKIEKILTFRIPYYVGPLARGNSRFAWMTRKSEETITPWNFEEVVDKGASAQSFIERMTNFDKNLPNEKVLPKHSLLYEYFTVYNELTKVKYVTEGMRKPAFLSGEQKKAIVDLLFKTNRKVTVKQLKEDYFKKIECFDSVEISGVEDRFNASLGTYHDLLKIIKDKDFLDNEENEDILEDIVLTLTLFEDREMIEERLKTYAHLFDDKVMKQLKRRRYTGWGRLSRKLINGIRDKQSGKTILDFLKSDGFANRNFMQLIHDDSLTFKEDIQKAQVSGQGDSLHEHIANLAGSPAIKKGILQTVKVVDELVKVMGRHKPENIVIEMARENQTTQKGQKNSRERMKRIEEGIKELGSQILKEHPVENTQLQNEKLYLYYLQNGRDMYVDQELDINRLSDYDVDHIVPQSFLKDDSIDNKVLTRSDKARGKSDNVPSEEVVKKMKNYWRQLLNAKLITQRKFDNLTKAERGGLSELDKAGFIKRQLVETRQITKHVAQILDSRMNTKYDENDKLIREVKVITLKSKLVSDFRKDFQFYKVREINNYHHAHDAYLNAVVGTALIKKYPKLESEFVYGDYKVYDVRKMIAKSEQEIGKATAKYFFYSNIMNFFKTEITLANGEIRKRPLIETNGETGEIVWDKGRDFATVRKVLSMPQVNIVKKTEVQTGGFSKESILPKRNSDKLIARKKDWDPKKYGGFDSPTVAYSVLVVAKVEKGKSKKLKSVKELLGITIMERSSFEKNPIDFLEAKGYKEVKKDLIIKLPKYSLFELENGRKRMLASAGELQKGNELALPSKYVNFLYLASHYEKLKGSPEDNEQKQLFVEQHKHYLDEIIEQISEFSKRVILADANLDKVLSAYNKHRDKPIREQAENIIHLFTLTNLGAPAAFKYFDTTIDRKRYTSTKEVLDATLIHQSITGLYETRIDLSQLGGDGGEAAAKGGSPAPGGIPWLMKKPLQLTTLVPLQEYEERLLKQTMLTGSYKEKLQSLFLKYDALWQHWENQVGHRRIKPHHIATGTVNPRPQKQYPINPKAKASIQTVINDLLKQGVLIQQNSIMNTPVYPVPKPDGKWRMVLDYREVNKTIPLIAAQNQHSAGILSSIFRGKYKTTLDLSNGFWAHSITPESYWLTAFTWLGQQYCWTRLPQGFLNSPALFTADVVDLLKEVPNVQVYVDDIYISHDDPREHLEQLEKVFSLLLNAGYVVSLKKSEIAQHEVEFLGFNITKEGRGLTETFKQKLLNITPPRDLKQLQSILGLLNFARNFIPNFSELVKPLYNIIATANGKYITWTTDNSQQLQNIISMLNSAENLEERNPEVRLIMKVNTSPSAGYIRFYNEFAKRPIMYLNYVYTKAEVKFTNTEKLLTTIHKGLIKALDLGMGQEILVYSPIVSMTKIQKTPLPERKALPIRWITWMSYLEDPRIQFHYDKTLPELQQVPTVTDDIIAKIKHPSEFSMVFYTDGSAIKHPNVNKSHNAGMGIAQVQFKPEFTVINTWSIPLGDHTAQLAEVAAVEFACKKALKIDGPVLIVTDSFYVAESVNKELPYWQSNGFFNNKKKPLKHVSKWKSIADCIQLKPDIIIIHEKGHQPTASTFHTEGNNLADKLATQGSYVVNAGKRTADGSEFEKRTADGSEFESPKKKAKVE

SEQ ID NO: 7224 - protein, 2087 aa, synthetic construct
MPAAKRVKLDGGDKKYSIGLDIGTNSVGWAVITDEYKVPSKKFKVLGNTDRHSIKKNLIGALLFDSGETAEATRLKRTARRRYTRRKNRICYLQEIFSNEMAKVDDSFFHRLEESFLVEEDKKHERHPIFGNIVDEVAYHEKYPTIYHLRKKLVDSTDKADLRLIYLALAHMIKFRGHFLIEGDLNPDNSDVDKLFIQLVQTYNQLFEENPINASGVDAKAILSARLSKSRRLENLIAQLPGEKKNGLFGNLIALSLGLTPNFKSNFDLAEDAKLQLSKDTYDDDLDNLLAQIGDQYADLFLAAKNLSDAILLSDILRVNTEITKAPLSASMIKRYDEHHQDLTLLKALVRQQLPEKYKEIFFDQSKNGYAGYIDGGASQEEFYKFIKPILEKMDGTEELLVKLNREDLLRKQRTFDNGSIPHQIHLGELHAILRRQEDFYPFLKDNREKIEKILTFRIPYYVGPLARGNSRFAWMTRKSEETITPWNFEEVVDKGASAQSFIERMTNFDKNLPNEKVLPKHSLLYEYFTVYNELTKVKYVTEGMRKPAFLSGEQKKAIVDLLFKTNRKVTVKQLKEDYFKKIECFDSVEISGVEDRFNASLGTYHDLLKIIKDKDFLDNEENEDILEDIVLTLTLFEDREMIEERLKTYAHLFDDKVMKQLKRRRYTGWGRLSRKLINGIRDKQSGKTILDFLKSDGFANRNFMQLIHDDSLTFKEDIQKAQVSGQGDSLHEHIANLAGSPAIKKGILQTVKVVDELVKVMGRHKPENIVIEMARENQTTQKGQKNSRERMKRIEEGIKELGSQILKEHPVENTQLQNEKLYLYYLQNGRDMYVDQELDINRLSDYDVDHIVPQSFLKDDSIDNKVLTRSDKARGKSDNVPSEEVVKKMKNYWRQLLNAKLITQRKFDNLTKAERGGLSELDKAGFIKRQLVETRQITKHVAQILDSRMNTKYDENDKLIREVKVITLKSKLVSDFRKDFQFYKVREINNYHHAHDAYLNAVVGTALIKKYPKLESEFVYGDYKVYDVRKMIAKSEQEIGKATAKYFFYSNIMNFFKTEITLANGEIRKRPLIETNGETGEIVWDKGRDFATVRKVLSMPQVNIVKKTEVQTGGFSKESILPKRNSDKLIARKKDWDPKKYGGFDSPTVAYSVLVVAKVEKGKSKKLKSVKELLGITIMERSSFEKNPIDFLEAKGYKEVKKDLIIKLPKYSLFELENGRKRMLASAGELQKGNELALPSKYVNFLYLASHYEKLKGSPEDNEQKQLFVEQHKHYLDEIIEQISEFSKRVILADANLDKVLSAYNKHRDKPIREQAENIIHLFTLTNLGAPAAFKYFDTTIDRKRYTSTKEVLDATLIHQSITGLYETRIDLSQLGGDGGEAAAKGGSPAPGGIPWLMKKPLQLTTLVPLQEYEERLLKQTMLTGSYKEKLQSLFLKYDALWQHWENQVGHRRIKPHHIATGTVNPRPQKQYPINPKAKASIQTVINDLLKQGVLIQQNSIMNTPVYPVPKPDGKWRMVLDYREVNKTIPLIAAQNQHSAGILSSIFRGKYKTTLDLSNGFWAHSITPESYWLTAFTWLGQQYCWTRLPQGFLNSPALFNADVVDLLKEVPNVQVYVDDIYISHDDPREHLEQLEKVFSLLLNAGYVVSLKKSEIAQHEVEFLGFNITKEGRGLTETFKQKLLNITPPRDLKQLQSILGLLNFARNFIPNFSELVKPLYNIIATAPGKYITWTTDNSQQLQNIISMLNSAENLEERNPEVRLIMKVNTSPSAGYIRFYNEFAKRPIMYLNYVYTKAEVKFTNTEKLLTTIHKGLIKALDLGMGQEILVYSPIVSMTKIQKTPLPERKALPIRWITWMSYLEDPRIQFHYDKTLPELQQVPTVTDDIIAKIKHPSEFSMVFYTDGSAIKHPNVNKSHNAGMGIAQVQFKPEFTVINTWSIPLGDHTAQLAEVAAVEFACKKALKIDGPVLIVTDSFYVAESVNKELPYWQSNGFFNNKKKPLKHVSKWKSIADCIQLKPDIIIIHEKGHQPTASTFHTEGNNLADKLATQGSYVVNAGKRTADGSEFEKRTADGSEFESPKKKAKVE

SEQ ID NO: 7225 - protein, 2094 aa, synthetic construct
MPAAKRVKLDGGDKKYSIGLDIGTNSVGWAVITDEYKVPSKKFKVLGNTDRHSIKKNLIGALLFDSGETAEATRLKRTARRRYTRRKNRICYLQEIFSNEMAKVDDSFFHRLEESFLVEEDKKHERHPIFGNIVDEVAYHEKYPTIYHLRKKLVDSTDKADLRLIYLALAHMIKFRGHFLIEGDLNPDNSDVDKLFIQLVQTYNQLFEENPINASGVDAKAILSARLSKSRRLENLIAQLPGEKKNGLFGNLIALSLGLTPNFKSNFDLAEDAKLQLSKDTYDDDLDNLLAQIGDQYADLFLAAKNLSDAILLSDILRVNTEITKAPLSASMIKRYDEHHQDLTLLKALVRQQLPEKYKEIFFDQSKNGYAGYIDGGASQEEFYKFIKPILEKMDGTEELLVKLNREDLLRKQRTFDNGSIPHQIHLGELHAILRRQEDFYPFLKDNREKIEKILTFRIPYYVGPLARGNSRFAWMTRKSEETITPWNFEEVVDKGASAQSFIERMTNFDKNLPNEKVLPKHSLLYEYFTVYNELTKVKYVTEGMRKPAFLSGEQKKAIVDLLFKTNRKVTVKQLKEDYFKKIECFDSVEISGVEDRFNASLGTYHDLLKIIKDKDFLDNEENEDILEDIVLTLTLFEDREMIEERLKTYAHLFDDKVMKQLKRRRYTGWGRLSRKLINGIRDKQSGKTILDFLKSDGFANRNFMQLIHDDSLTFKEDIQKAQVSGQGDSLHEHIANLAGSPAIKKGILQTVKVVDELVKVMGRHKPENIVIEMARENQTTQKGQKNSRERMKRIEEGIKELGSQILKEHPVENTQLQNEKLYLYYLQNGRDMYVDQELDINRLSDYDVDHIVPQSFLKDDSIDNKVLTRSDKARGKSDNVPSEEVVKKMKNYWRQLLNAKLITQRKFDNLTKAERGGLSELDKAGFIKRQLVETRQITKHVAQILDSRMNTKYDENDKLIREVKVITLKSKLVSDFRKDFQFYKVREINNYHHAHDAYLNAVVGTALIKKYPKLESEFVYGDYKVYDVRKMIAKSEQEIGKATAKYFFYSNIMNFFKTEITLANGEIRKRPLIETNGETGEIVWDKGRDFATVRKVLSMPQVNIVKKTEVQTGGFSKESILPKRNSDKLIARKKDWDPKKYGGFDSPTVAYSVLVVAKVEKGKSKKLKSVKELLGITIMERSSFEKNPIDFLEAKGYKEVKKDLIIKLPKYSLFELENGRKRMLASAGELQKGNELALPSKYVNFLYLASHYEKLKGSPEDNEQKQLFVEQHKHYLDEIIEQISEFSKRVILADANLDKVLSAYNKHRDKPIREQAENIIHLFTLTNLGAPAAFKYFDTTIDRKRYTSTKEVLDATLIHQSITGLYETRIDLSQLGGDGGEAAAKGGSPAPGGVLNLEEEYRLHEKPVPSSIDPSWLQLFPTVWAERAGMGLANQVPPVVVELRSGASPVAVRQYPMSKEAREGIRPHIQRFLDLGVLVPCQSPWNTPLLPVKKPGTNDYRPVQDLREINKRVQDIHPTVPNPYNLLSSLPPSHTWYSVLDLKDAFFCLKLHPNSQPLFAFEWRDPEKGNTGQLTWTRLPQGFKNSPTLFDEALHRDLAPFRALNPQVVLLQYVDDLLVAAPTYRDCKEGTQKLLQELSKLGYRVSAKKAQLCQKEVTYLGYLLKEGKRWLTPARKATVMKIPPPTTPRQVREFLGTAGFCRLWIPGFASLAAPLYPLTKESIPFIWTEEHQKAFDRIKEALLSAPALALPDLTKPFTLYVDERAGVARGVLTQTLGPWRRPVAYLSKKLDPVASGWPTCLKAVAAVALLLKDADKLTLGQNVTVIASHSLESIVRQPPDRWMTNARMTHYQSLLLNERVSFAPPAVLNPATLLPVESEATPVHRCSEILAEETGTRRDLKDQPLPGVPAWYTDGSSFIAEGKRRAGAAIVDGKRTVWASSLPEGTSAQKAELVALTQALRLAEGKDINIYTDSRYAFATAHIHGAIYKQRGLLTSAGKDIKNKEEILALLEAIHLPKRVAIIHCPGHQKGNDPVATGNRRADEAAKQAALSTRVLAETTKPAGKRTADGSEFEKRTADGSEFESPKKKAKVE

SEQ ID NO: 7226 - protein, 2094 aa, synthetic construct
MPAAKRVKLDGGDKKYSIGLDIGTNSVGWAVITDEYKVPSKKFKVLGNTDRHSIKKNLIGALLFDSGETAEATRLKRTARRRYTRRKNRICYLQEIFSNEMAKVDDSFFHRLEESFLVEEDKKHERHPIFGNIVDEVAYHEKYPTIYHLRKKLVDSTDKADLRLIYLALAHMIKFRGHFLIEGDLNPDNSDVDKLFIQLVQTYNQLFEENPINASGVDAKAILSARLSKSRRLENLIAQLPGEKKNGLFGNLIALSLGLTPNFKSNFDLAEDAKLQLSKDTYDDDLDNLLAQIGDQYADLFLAAKNLSDAILLSDILRVNTEITKAPLSASMIKRYDEHHQDLTLLKALVRQQLPEKYKEIFFDQSKNGYAGYIDGGASQEEFYKFIKPILEKMDGTEELLVKLNREDLLRKQRTFDNGSIPHQIHLGELHAILRRQEDFYPFLKDNREKIEKILTFRIPYYVGPLARGNSRFAWMTRKSEETITPWNFEEVVDKGASAQSFIERMTNFDKNLPNEKVLPKHSLLYEYFTVYNELTKVKYVTEGMRKPAFLSGEQKKAIVDLLFKTNRKVTVKQLKEDYFKKIECFDSVEISGVEDRFNASLGTYHDLLKIIKDKDFLDNEENEDILEDIVLTLTLFEDREMIEERLKTYAHLFDDKVMKQLKRRRYTGWGRLSRKLINGIRDKQSGKTILDFLKSDGFANRNFMQLIHDDSLTFKEDIQKAQVSGQGDSLHEHIANLAGSPAIKKGILQTVKVVDELVKVMGRHKPENIVIEMARENQTTQKGQKNSRERMKRIEEGIKELGSQILKEHPVENTQLQNEKLYLYYLQNGRDMYVDQELDINRLSDYDVDHIVPQSFLKDDSIDNKVLTRSDKARGKSDNVPSEEVVKKMKNYWRQLLNAKLITQRKFDNLTKAERGGLSELDKAGFIKRQLVETRQITKHVAQILDSRMNTKYDENDKLIREVKVITLKSKLVSDFRKDFQFYKVREINNYHHAHDAYLNAVVGTALIKKYPKLESEFVYGDYKVYDVRKMIAKSEQEIGKATAKYFFYSNIMNFFKTEITLANGEIRKRPLIETNGETGEIVWDKGRDFATVRKVLSMPQVNIVKKTEVQTGGFSKESILPKRNSDKLIARKKDWDPKKYGGFDSPTVAYSVLVVAKVEKGKSKKLKSVKELLGITIMERSSFEKNPIDFLEAKGYKEVKKDLIIKLPKYSLFELENGRKRMLASAGELQKGNELALPSKYVNFLYLASHYEKLKGSPEDNEQKQLFVEQHKHYLDEIIEQISEFSKRVILADANLDKVLSAYNKHRDKPIREQAENIIHLFTLTNLGAPAAFKYFDTTIDRKRYTSTKEVLDATLIHQSITGLYETRIDLSQLGGDGGEAAAKGGSPAPGGVLNLEEEYRLHEKPVPSSIDPSWLQLFPTVWAERAGMGLANQVPPVVVELRSGASPVAVRQYPMSKEAREGIRPHIQRFLDLGVLVPCQSPWNTPLLPVKKPGTNDYRPVQDLREINKRVQDIHPTVPNPYNLLSSLPPSHTWYSVLDLKDAFFCLKLHPNSQPLFAFEWRDPEKGNTGQLTWTRLPQGFKNSPTLFNEALHRDLAPFRALNPQVVLLQYVDDLLVAAPTYRDCKEGTQKLLQELSKLGYRVSAKKAQLCQKEVTYLGYLLKEGKRWLTPARKATVMKIPPPTTPRQVREFLGKAGFCRLFIPGFASLAAPLYPLTKPSIPFIWTEEHQKAFDRIKEALLSAPALALPDLTKPFTLYVDERAGVARGVLTQTLGPWRRPVAYLSKKLDPVASGWPTCLKAVAAVALLLKDADKLTLGQNVTVIASHSLESIVRQPPDRWMTNARMTHYQSLLLNERVSFAPPAVLNPATLLPVESEATPVHRCSEILAEETGTRRDLKDQPLPGVPAWYTDGSSFIAEGKRRAGAAIVDGKRTVWASSLPEGTSAQKAELVALTQALRLAEGKDINIYTDSRYAFATAHIHGAIYKQRGWLTSAGKDIKNKEEILALLEAIHLPKRVAIIHCPGHQKGNDPVATGNRRADEAAKQAALSTRVLAETTKPAGKRTADGSEFEKRTADGSEFESPKKKAKVE

SEQ ID NO: 7227 - protein, 2096 aa, synthetic construct
MPAAKRVKLDGGDKKYSIGLDIGTNSVGWAVITDEYKVPSKKFKVLGNTDRHSIKKNLIGALLFDSGETAEATRLKRTARRRYTRRKNRICYLQEIFSNEMAKVDDSFFHRLEESFLVEEDKKHERHPIFGNIVDEVAYHEKYPTIYHLRKKLVDSTDKADLRLIYLALAHMIKFRGHFLIEGDLNPDNSDVDKLFIQLVQTYNQLFEENPINASGVDAKAILSARLSKSRRLENLIAQLPGEKKNGLFGNLIALSLGLTPNFKSNFDLAEDAKLQLSKDTYDDDLDNLLAQIGDQYADLFLAAKNLSDAILLSDILRVNTEITKAPLSASMIKRYDEHHQDLTLLKALVRQQLPEKYKEIFFDQSKNGYAGYIDGGASQEEFYKFIKPILEKMDGTEELLVKLNREDLLRKQRTFDNGSIPHQIHLGELHAILRRQEDFYPFLKDNREKIEKILTFRIPYYVGPLARGNSRFAWMTRKSEETITPWNFEEVVDKGASAQSFIERMTNFDKNLPNEKVLPKHSLLYEYFTVYNELTKVKYVTEGMRKPAFLSGEQKKAIVDLLFKTNRKVTVKQLKEDYFKKIECFDSVEISGVEDRFNASLGTYHDLLKIIKDKDFLDNEENEDILEDIVLTLTLFEDREMIEERLKTYAHLFDDKVMKQLKRRRYTGWGRLSRKLINGIRDKQSGKTILDFLKSDGFANRNFMQLIHDDSLTFKEDIQKAQVSGQGDSLHEHIANLAGSPAIKKGILQTVKVVDELVKVMGRHKPENIVIEMARENQTTQKGQKNSRERMKRIEEGIKELGSQILKEHPVENTQLQNEKLYLYYLQNGRDMYVDQELDINRLSDYDVDHIVPQSFLKDDSIDNKVLTRSDKARGKSDNVPSEEVVKKMKNYWRQLLNAKLITQRKFDNLTKAERGGLSELDKAGFIKRQLVETRQITKHVAQILDSRMNTKYDENDKLIREVKVITLKSKLVSDFRKDFQFYKVREINNYHHAHDAYLNAVVGTALIKKYPKLESEFVYGDYKVYDVRKMIAKSEQEIGKATAKYFFYSNIMNFFKTEITLANGEIRKRPLIETNGETGEIVWDKGRDFATVRKVLSMPQVNIVKKTEVQTGGFSKESILPKRNSDKLIARKKDWDPKKYGGFDSPTVAYSVLVVAKVEKGKSKKLKSVKELLGITIMERSSFEKNPIDFLEAKGYKEVKKDLIIKLPKYSLFELENGRKRMLASAGELQKGNELALPSKYVNFLYLASHYEKLKGSPEDNEQKQLFVEQHKHYLDEIIEQISEFSKRVILADANLDKVLSAYNKHRDKPIREQAENIIHLFTLTNLGAPAAFKYFDTTIDRKRYTSTKEVLDATLIHQSITGLYETRIDLSQLGGDGGEAAAKGGSPAPGGTLNIEDEYRLHETSKEPDVPLGSTWLSDFPQAWAETGGMGLAVRQAPLIIPLKATSTPVSIKQYPMSQEARLGIKPHIQRLLDQGILVPCQSPWNTPLLPVKKPGTNDYRPVQDLREVNKRVEDIHPTVPNPYNLLSGLPPSHQWYTVLDLKDAFFCLRLHPTSQPLFAFEWRDPEMGISGQLTWTRLPQGFKNSPTLFNEALHRDLADFRIQHPDLILLQYVDDLLLAATSEQDCQRGTRALLQTLGNLGYRASAKKAQICQKQVKYLGYLLKEGQRWLTEARKETVMGQPTPKTPRQLREFLGTAGFCRLWIPGFAEMAAPLYPLTKPGTLFNWGPDQQKAYQEIKQALLTAPALGLPDLTKPFELFVDEKQGYAKGVLTQKLGPWRRPVAYLSKKLDPVAAGWPPCLRMVAAIAVLTKDAGKLTMGQPLVILAPHAVEALVKQPPDRWLSNARMTHYQAMLLDTDRVQFGPVVALNPATLLPLPEKEAPHDCLEILAETHGTRPDLTDQPIPDADYTWYTDGSSFLQEGQRRAGAAVTTETEVIWARALPAGTSAQRAELIALTQALKMAEGKKLNVYTDSRYAFATAHVHGEIYRRRGWLTSEGREIKNKNEILALLKALFLPKRLSIIHCPGHQKGNSAEARGNRMADQAAREAAMKAVLETSTLLAGKRTADGSEFEKRTADGSEFESPKKKAKVE

SEQ ID NO: 7228 - protein, 2087 aa, synthetic construct
MPAAKRVKLDGGDKKYSIGLDIGTNSVGWAVITDEYKVPSKKFKVLGNTDRHSIKKNLIGALLFDSGETAEATRLKRTARRRYTRRKNRICYLQEIFSNEMAKVDDSFFHRLEESFLVEEDKKHERHPIFGNIVDEVAYHEKYPTIYHLRKKLVDSTDKADLRLIYLALAHMIKFRGHFLIEGDLNPDNSDVDKLFIQLVQTYNQLFEENPINASGVDAKAILSARLSKSRRLENLIAQLPGEKKNGLFGNLIALSLGLTPNFKSNFDLAEDAKLQLSKDTYDDDLDNLLAQIGDQYADLFLAAKNLSDAILLSDILRVNTEITKAPLSASMIKRYDEHHQDLTLLKALVRQQLPEKYKEIFFDQSKNGYAGYIDGGASQEEFYKFIKPILEKMDGTEELLVKLNREDLLRKQRTFDNGSIPHQIHLGELHAILRRQEDFYPFLKDNREKIEKILTFRIPYYVGPLARGNSRFAWMTRKSEETITPWNFEEVVDKGASAQSFIERMTNFDKNLPNEKVLPKHSLLYEYFTVYNELTKVKYVTEGMRKPAFLSGEQKKAIVDLLFKTNRKVTVKQLKEDYFKKIECFDSVEISGVEDRFNASLGTYHDLLKIIKDKDFLDNEENEDILEDIVLTLTLFEDREMIEERLKTYAHLFDDKVMKQLKRRRYTGWGRLSRKLINGIRDKQSGKTILDFLKSDGFANRNFMQLIHDDSLTFKEDIQKAQVSGQGDSLHEHIANLAGSPAIKKGILQTVKVVDELVKVMGRHKPENIVIEMARENQTTQKGQKNSRERMKRIEEGIKELGSQILKEHPVENTQLQNEKLYLYYLQNGRDMYVDQELDINRLSDYDVDHIVPQSFLKDDSIDNKVLTRSDKARGKSDNVPSEEVVKKMKNYWRQLLNAKLITQRKFDNLTKAERGGLSELDKAGFIKRQLVETRQITKHVAQILDSRMNTKYDENDKLIREVKVITLKSKLVSDFRKDFQFYKVREINNYHHAHDAYLNAVVGTALIKKYPKLESEFVYGDYKVYDVRKMIAKSEQEIGKATAKYFFYSNIMNFFKTEITLANGEIRKRPLIETNGETGEIVWDKGRDFATVRKVLSMPQVNIVKKTEVQTGGFSKESILPKRNSDKLIARKKDWDPKKYGGFDSPTVAYSVLVVAKVEKGKSKKLKSVKELLGITIMERSSFEKNPIDFLEAKGYKEVKKDLIIKLPKYSLFELENGRKRMLASAGELQKGNELALPSKYVNFLYLASHYEKLKGSPEDNEQKQLFVEQHKHYLDEIIEQISEFSKRVILADANLDKVLSAYNKHRDKPIREQAENIIHLFTLTNLGAPAAFKYFDTTIDRKRYTSTKEVLDATLIHQSITGLYETRIDLSQLGGDGGEAAAKPAPGGSGGVPWILKKPLELTIKLDLEEQQGTLLNNSILSKKGKEELKQLFEKYSALWQSWENQVGHRRIRPHKIATGTVKPTPQKQYHINPKAKPDIQIVINDLLKQGVLIQKESTMNTPVYPVPKPNGRWRMVLDYRAVNKVTPLIAVQNQHSYGILGSLFKGRYKTTIDLSNGFWAHPIVPEDYWITAFTWQGKQYCWTVLPQGFLNSPGLFNGDVVDLLQGIPNVEVYVDDVYISHDSEKEHLEYLDILFNRLKEAGYIISLKKSNIANSIVDFLGFQITNEGRGLTDTFKEKLENITAPTTLKQLQSILGLLNFARNFIPDFTELIAPLYALIPKSPKNYVPWQIEHSTTLETLITKLNGAEYLQGRKGDKTLIMKVNASYTTGYIRYYNEGEKKPISYVSIVFSKTELKFTELEKLLTTVHKGLLKALDLSMGQNIHVYSPIVSMQNIQKTPQTAKKALASRWLSWLSYLEDPRIRFFYDPQMPALKDLPAVDTGKDNKKHPSNFQHIFYTDGSAITSPTKEGHLNAGMGIVYFINKDGNLQKQQEWSISLGNHTAQFAEIAAFEFALKKCLPLGGNILVVTDSNYVAKAYNEELDVWASNGFVNNRKKPLKHISKWKSVADLKRLRPDVVVTHEPGHQKLDSSPHAYGNNLADQLATQASFKVHAGKRTADGSEFEKRTADGSEFESPKKKAKVE

SEQ ID NO: 7229 - protein, 2176 aa, synthetic construct
MPAAKRVKLDGGDKKYSIGLDIGTNSVGWAVITDEYKVPSKKFKVLGNTDRHSIKKNLIGALLFDSGETAEATRLKRTARRRYTRRKNRICYLQEIFSNEMAKVDDSFFHRLEESFLVEEDKKHERHPIFGNIVDEVAYHEKYPTIYHLRKKLVDSTDKADLRLIYLALAHMIKFRGHFLIEGDLNPDNSDVDKLFIQLVQTYNQLFEENPINASGVDAKAILSARLSKSRRLENLIAQLPGEKKNGLFGNLIALSLGLTPNFKSNFDLAEDAKLQLSKDTYDDDLDNLLAQIGDQYADLFLAAKNLSDAILLSDILRVNTEITKAPLSASMIKRYDEHHQDLTLLKALVRQQLPEKYKEIFFDQSKNGYAGYIDGGASQEEFYKFIKPILEKMDGTEELLVKLNREDLLRKQRTFDNGSIPHQIHLGELHAILRRQEDFYPFLKDNREKIEKILTFRIPYYVGPLARGNSRFAWMTRKSEETITPWNFEEVVDKGASAQSFIERMTNFDKNLPNEKVLPKHSLLYEYFTVYNELTKVKYVTEGMRKPAFLSGEQKKAIVDLLFKTNRKVTVKQLKEDYFKKIECFDSVEISGVEDRFNASLGTYHDLLKIIKDKDFLDNEENEDILEDIVLTLTLFEDREMIEERLKTYAHLFDDKVMKQLKRRRYTGWGRLSRKLINGIRDKQSGKTILDFLKSDGFANRNFMQLIHDDSLTFKEDIQKAQVSGQGDSLHEHIANLAGSPAIKKGILQTVKVVDELVKVMGRHKPENIVIEMARENQTTQKGQKNSRERMKRIEEGIKELGSQILKEHPVENTQLQNEKLYLYYLQNGRDMYVDQELDINRLSDYDVDHIVPQSFLKDDSIDNKVLTRSDKARGKSDNVPSEEVVKKMKNYWRQLLNAKLITQRKFDNLTKAERGGLSELDKAGFIKRQLVETRQITKHVAQILDSRMNTKYDENDKLIREVKVITLKSKLVSDFRKDFQFYKVREINNYHHAHDAYLNAVVGTALIKKYPKLESEFVYGDYKVYDVRKMIAKSEQEIGKATAKYFFYSNIMNFFKTEITLANGEIRKRPLIETNGETGEIVWDKGRDFATVRKVLSMPQVNIVKKTEVQTGGFSKESILPKRNSDKLIARKKDWDPKKYGGFDSPTVAYSVLVVAKVEKGKSKKLKSVKELLGITIMERSSFEKNPIDFLEAKGYKEVKKDLIIKLPKYSLFELENGRKRMLASAGELQKGNELALPSKYVNFLYLASHYEKLKGSPEDNEQKQLFVEQHKHYLDEIIEQISEFSKRVILADANLDKVLSAYNKHRDKPIREQAENIIHLFTLTNLGAPAAFKYFDTTIDRKRYTSTKEVLDATLIHQSITGLYETRIDLSQLGGDGGEAAAKPAPGGSGGMNPLQLLQPLPAEIKGTKLLAHWNSGATITCIPESFLEDEQPIKKTLIKTIHGEKQQNVYYVTFKVKGRKVEAEVIASPYEYILLSPTDVPWLTQQPLQLTILVPLQEYQEKILSKTALPEDQKQQLKTLFVKYDNLWQHWENQVGHRKIRPHNIATGDYPPRPQKQYPINPKAKPSIQIVIDDLLKQGVLTPQNSTMNTPVYPVPKPDGRWRMVLDYREVNKTIPLTAAQNQHSAGILATIVRQKYKTTLDLANGFWAHPITPESYWLTAFTWQGKQYCWTRLPQGFLNSPALFNADVVDLLKEIPNVQVYVDDIYLSHDDPKEHVQQLEKVFQILLQAGYVVSLKKSEIGQKTVEFLGFNITKEGRGLTDTFKTKLLNITPPKDLKQLQSILGLLNFARNFIPNFAELVQPLYNLIAPAKGKYIEWSEENTKQLNMVIEALNTASNLEERLPEQRLVIKVNTSPSAGYVRYYNETGKKPIMYLNYVFSKAELKFSMLEKLLTTMHKALIKAMDLAMGQEILVYSPIVSMTKIQKTPLPERKALPIRWITWMTYLEDPRIQFHYDKTLPELKHIPDVYTSSQSPVKHPSQYEGVFYTDGSAIKSPDPTKSNNAGMGIVHATYKPEYQVLNQWSIPLGNHTAQMAEIAAVEFACKKALKIPGPVLVITDSFYVAESANKELPYWKSNGFVNNKKKPLKHISKWKSIAECLSMKPDITIQHEKGISLQIPVFILKGNALADKLATQGSYVVNAGKRTADGSEFEKRTADGSEFESPKKKAKVE

SEQ ID NO: 7230 - protein, 2094 aa, synthetic construct
MPAAKRVKLDGGDKKYSIGLDIGTNSVGWAVITDEYKVPSKKFKVLGNTDRHSIKKNLIGALLFDSGETAEATRLKRTARRRYTRRKNRICYLQEIFSNEMAKVDDSFFHRLEESFLVEEDKKHERHPIFGNIVDEVAYHEKYPTIYHLRKKLVDSTDKADLRLIYLALAHMIKFRGHFLIEGDLNPDNSDVDKLFIQLVQTYNQLFEENPINASGVDAKAILSARLSKSRRLENLIAQLPGEKKNGLFGNLIALSLGLTPNFKSNFDLAEDAKLQLSKDTYDDDLDNLLAQIGDQYADLFLAAKNLSDAILLSDILRVNTEITKAPLSASMIKRYDEHHQDLTLLKALVRQQLPEKYKEIFFDQSKNGYAGYIDGGASQEEFYKFIKPILEKMDGTEELLVKLNREDLLRKQRTFDNGSIPHQIHLGELHAILRRQEDFYPFLKDNREKIEKILTFRIPYYVGPLARGNSRFAWMTRKSEETITPWNFEEVVDKGASAQSFIERMTNFDKNLPNEKVLPKHSLLYEYFTVYNELTKVKYVTEGMRKPAFLSGEQKKAIVDLLFKTNRKVTVKQLKEDYFKKIECFDSVEISGVEDRFNASLGTYHDLLKIIKDKDFLDNEENEDILEDIVLTLTLFEDREMIEERLKTYAHLFDDKVMKQLKRRRYTGWGRLSRKLINGIRDKQSGKTILDFLKSDGFANRNFMQLIHDDSLTFKEDIQKAQVSGQGDSLHEHIANLAGSPAIKKGILQTVKVVDELVKVMGRHKPENIVIEMARENQTTQKGQKNSRERMKRIEEGIKELGSQILKEHPVENTQLQNEKLYLYYLQNGRDMYVDQELDINRLSDYDVDHIVPQSFLKDDSIDNKVLTRSDKARGKSDNVPSEEVVKKMKNYWRQLLNAKLITQRKFDNLTKAERGGLSELDKAGFIKRQLVETRQITKHVAQILDSRMNTKYDENDKLIREVKVITLKSKLVSDFRKDFQFYKVREINNYHHAHDAYLNAVVGTALIKKYPKLESEFVYGDYKVYDVRKMIAKSEQEIGKATAKYFFYSNIMNFFKTEITLANGEIRKRPLIETNGETGEIVWDKGRDFATVRKVLSMPQVNIVKKTEVQTGGFSKESILPKRNSDKLIARKKDWDPKKYGGFDSPTVAYSVLVVAKVEKGKSKKLKSVKELLGITIMERSSFEKNPIDFLEAKGYKEVKKDLIIKLPKYSLFELENGRKRMLASAGELQKGNELALPSKYVNFLYLASHYEKLKGSPEDNEQKQLFVEQHKHYLDEIIEQISEFSKRVILADANLDKVLSAYNKHRDKPIREQAENIIHLFTLTNLGAPAAFKYFDTTIDRKRYTSTKEVLDATLIHQSITGLYETRIDLSQLGGDGGEAAAKPAPGGSGGVLNLEEEYRLHEKPVPSSIDPSWLQLFPTVWAERAGMGLANQVPPVVVELRSGASPVAVRQYPMSKEAREGIRPHIQKFLDLGVLVPCRSPWNTPLLPVKKPGTNDYRPVQDLREINKRVQDIHPTVPNPYNLLSSLPPSYTWYSVLDLKDAFFCLRLHPNSQPLFAFEWKDPEKGNTGQLTWTRLPQGFKNSPTLFNEALHRDLAPFRALNPQVVLLQYVDDLLVAAPTYEDCKKGTQKLLQELSKLGYRVSAKKAQLCQREVTYLGYLLKEGKRWLTPARKATVMKIPVPTTPRQVREFLGTAGFCRLWIPGFASLAAPLYPLTKPSIPFIWTEEHQQAFDHIKKALLSAPALALPDLTKPFTLYIDERAGVARGVLTQTLGPWRRPVAYLSKKLDPVASGWPTCLKAVAAVALLLKDADKLTLGQNVTVIASHSLESIVRQPPDRWMTNARMTHYQSLLLNERVSFAPPAVLNPATLLPVESEATPVHRCSEILAEETGTRRDLEDQPLPGVPTWYTDGSSFITEGKRRAGAPIVDGKRTVWASSLPEGTSAQKAELVALTQALRLAEGKNINIYTDSRYAFATAHIHGAIYKQRGWLTSAGKDIKNKEEILALLEAIHLPRRVAIIHCPGHQRGSNPVATGNRRADEAAKQAALSTRVLAGTTKPAGKRTADGSEFEKRTADGSEFESPKKKAKVE

SEQ ID NO: 7231 - protein, 2127 aa, synthetic construct
MPAAKRVKLDGGDKKYSIGLDIGTNSVGWAVITDEYKVPSKKFKVLGNTDRHSIKKNLIGALLFDSGETAEATRLKRTARRRYTRRKNRICYLQEIFSNEMAKVDDSFFHRLEESFLVEEDKKHERHPIFGNIVDEVAYHEKYPTIYHLRKKLVDSTDKADLRLIYLALAHMIKFRGHFLIEGDLNPDNSDVDKLFIQLVQTYNQLFEENPINASGVDAKAILSARLSKSRRLENLIAQLPGEKKNGLFGNLIALSLGLTPNFKSNFDLAEDAKLQLSKDTYDDDLDNLLAQIGDQYADLFLAAKNLSDAILLSDILRVNTEITKAPLSASMIKRYDEHHQDLTLLKALVRQQLPEKYKEIFFDQSKNGYAGYIDGGASQEEFYKFIKPILEKMDGTEELLVKLNREDLLRKQRTFDNGSIPHQIHLGELHAILRRQEDFYPFLKDNREKIEKILTFRIPYYVGPLARGNSRFAWMTRKSEETITPWNFEEVVDKGASAQSFIERMTNFDKNLPNEKVLPKHSLLYEYFTVYNELTKVKYVTEGMRKPAFLSGEQKKAIVDLLFKTNRKVTVKQLKEDYFKKIECFDSVEISGVEDRFNASLGTYHDLLKIIKDKDFLDNEENEDILEDIVLTLTLFEDREMIEERLKTYAHLFDDKVMKQLKRRRYTGWGRLSRKLINGIRDKQSGKTILDFLKSDGFANRNFMQLIHDDSLTFKEDIQKAQVSGQGDSLHEHIANLAGSPAIKKGILQTVKVVDELVKVMGRHKPENIVIEMARENQTTQKGQKNSRERMKRIEEGIKELGSQILKEHPVENTQLQNEKLYLYYLQNGRDMYVDQELDINRLSDYDVDHIVPQSFLKDDSIDNKVLTRSDKARGKSDNVPSEEVVKKMKNYWRQLLNAKLITQRKFDNLTKAERGGLSELDKAGFIKRQLVETRQITKHVAQILDSRMNTKYDENDKLIREVKVITLKSKLVSDFRKDFQFYKVREINNYHHAHDAYLNAVVGTALIKKYPKLESEFVYGDYKVYDVRKMIAKSEQEIGKATAKYFFYSNIMNFFKTEITLANGEIRKRPLIETNGETGEIVWDKGRDFATVRKVLSMPQVNIVKKTEVQTGGFSKESILPKRNSDKLIARKKDWDPKKYGGFDSPTVAYSVLVVAKVEKGKSKKLKSVKELLGITIMERSSFEKNPIDFLEAKGYKEVKKDLIIKLPKYSLFELENGRKRMLASAGELQKGNELALPSKYVNFLYLASHYEKLKGSPEDNEQKQLFVEQHKHYLDEIIEQISEFSKRVILADANLDKVLSAYNKHRDKPIREQAENIIHLFTLTNLGAPAAFKYFDTTIDRKRYTSTKEVLDATLIHQSITGLYETRIDLSQLGGDGGEAAAKPAPGGSGGLLGRDLLTKLKAQIQFSTEGPQVTWEDRPAMCLVLNLEEEYRLHEKPVPPSIDPSWLQLFPMVWAEKAGMGLANQVPPVVVELKSDASPVAVRQYPMSKEAREGIRPHIQRFLDLGILVPCQSPWNTPLLPVKKPGTNDYRPVQDLREVNKRVQDIHPTVPNPYNLLSSLPPSHTWYSVLDLKDAFFCLKLHPNSQPLFAFEWRDPEKGNTGQLTWTRLPQGFKNSPTLFNEALHRDLASFRALNPQVVMLQYVDDLLVAAPTYRDCKEGTRRLLQELSKLGYRVSAKKAQLCREEVTYLGYLLKGGKRWLTPARKATVMKIPTPTTPRQVREFLGTAGFCRLWIPGFASLAAPLYPLTRPKVPFTWTEAHQEAFGRIKEALLSAPALALPDLTKPFALYVDEKEGVARGVLTQTLGPWRRPVAYLSKKLDPVASGWPTCLKAIAAVALLLKDADKLTLGQNVLVIAPHNLESIVRQPPDRWMTNARMTHYQSLLLNERVSFAPPAILNPATLLPVESDDTPIHICSEILAEETGTRPDLRDQPLPGVPAWYTDGSSFIMDGRRQAGAAIVDNKRTVWASNLPEGTSAQKAELIALTQALRLAEGKSINIYTDSRYAFATAHVHGAIYKQRGWLTSAGKDIKNKEEILALLEAIHLPKRVAIIHCPGHQRGTDPVATGNRKADEAAKQAAQSTRILTETTKNAGKRTADGSEFEKRTADGSEFESPKKKAKVE

SEQ ID NO: 7232 - protein, 2218 aa, synthetic construct
MPAAKRVKLDGGDKKYSIGLDIGTNSVGWAVITDEYKVPSKKFKVLGNTDRHSIKKNLIGALLFDSGETAEATRLKRTARRRYTRRKNRICYLQEIFSNEMAKVDDSFFHRLEESFLVEEDKKHERHPIFGNIVDEVAYHEKYPTIYHLRKKLVDSTDKADLRLIYLALAHMIKFRGHFLIEGDLNPDNSDVDKLFIQLVQTYNQLFEENPINASGVDAKAILSARLSKSRRLENLIAQLPGEKKNGLFGNLIALSLGLTPNFKSNFDLAEDAKLQLSKDTYDDDLDNLLAQIGDQYADLFLAAKNLSDAILLSDILRVNTEITKAPLSASMIKRYDEHHQDLTLLKALVRQQLPEKYKEIFFDQSKNGYAGYIDGGASQEEFYKFIKPILEKMDGTEELLVKLNREDLLRKQRTFDNGSIPHQIHLGELHAILRRQEDFYPFLKDNREKIEKILTFRIPYYVGPLARGNSRFAWMTRKSEETITPWNFEEVVDKGASAQSFIERMTNFDKNLPNEKVLPKHSLLYEYFTVYNELTKVKYVTEGMRKPAFLSGEQKKAIVDLLFKTNRKVTVKQLKEDYFKKIECFDSVEISGVEDRFNASLGTYHDLLKIIKDKDFLDNEENEDILEDIVLTLTLFEDREMIEERLKTYAHLFDDKVMKQLKRRRYTGWGRLSRKLINGIRDKQSGKTILDFLKSDGFANRNFMQLIHDDSLTFKEDIQKAQVSGQGDSLHEHIANLAGSPAIKKGILQTVKVVDELVKVMGRHKPENIVIEMARENQTTQKGQKNSRERMKRIEEGIKELGSQILKEHPVENTQLQNEKLYLYYLQNGRDMYVDQELDINRLSDYDVDHIVPQSFLKDDSIDNKVLTRSDKARGKSDNVPSEEVVKKMKNYWRQLLNAKLITQRKFDNLTKAERGGLSELDKAGFIKRQLVETRQITKHVAQILDSRMNTKYDENDKLIREVKVITLKSKLVSDFRKDFQFYKVREINNYHHAHDAYLNAVVGTALIKKYPKLESEFVYGDYKVYDVRKMIAKSEQEIGKATAKYFFYSNIMNFFKTEITLANGEIRKRPLIETNGETGEIVWDKGRDFATVRKVLSMPQVNIVKKTEVQTGGFSKESILPKRNSDKLIARKKDWDPKKYGGFDSPTVAYSVLVVAKVEKGKSKKLKSVKELLGITIMERSSFEKNPIDFLEAKGYKEVKKDLIIKLPKYSLFELENGRKRMLASAGELQKGNELALPSKYVNFLYLASHYEKLKGSPEDNEQKQLFVEQHKHYLDEIIEQISEFSKRVILADANLDKVLSAYNKHRDKPIREQAENIIHLFTLTNLGAPAAFKYFDTTIDRKRYTSTKEVLDATLIHQSITGLYETRIDLSQLGGDGGEAAAKPAPGGSGGTLGDQGSRGSDPLPEPRVTLTVEGIPTEFLVNTGAEHSVLTKPMGKMGSKRTVVAGATGSKVYPWTTKRLLKIGQKQVTHSFLVIPECPAPLLGRDLLTKLKAQIQFSTEGPQVTWEDRPAMCLVLNLEEEYRLHEKPVPPSIDPSWLQLFPMVWAEKAGMGLANQVPPVVVELKSDASPVAVRQYPMSKEAREGIRPHIQRFLDLGILVPCQSPWNTPLLPVKKPGTNDYRPVQDLREVNKRVQDIHPTVPNPYNLLSSLPPSHTWYSVLDLKDAFFCLKLHPNSQPLFAFEWRDPEKGNTGQLTWTRLPQGFKNSPTLFNEALHRDLASFRALNPQVVMLQYVDDLLVAAPTYRDCKEGTRRLLQELSKLGYRVSAKKAQLCREEVTYLGYLLKGGKRWLTPARKATVMKIPTPTTPRQVREFLGTAGFCRLWIPGFASLAAPLYPLTRPKVPFTWTEAHQEAFGRIKEALLSAPALALPDLTKPFALYVDEKEGVARGVLTQTLGPWRRPVAYLSKKLDPVASGWPTCLKAIAAVALLLKDADKLTLGQNVLVIAPHNLESIVRQPPDRWMTNARMTHYQSLLLNERVSFAPPAILNPATLLPVESDDTPIHICSEILAEETGTRPDLRDQPLPGVPAWYTDGSSFIMDGRRQAGAAIVDNKRTVWASNLPEGTSAQKAELIALTQALRLAEGKSINIYTDSRYAFATAHVHGAIYKQRGWLTSAGKDIKNKEEILALLEAIHLPKRVAIIHCPGHQRGTDPVATGNRKADEAAKQAAQSTRILTETTKNAGKRTADGSEFEKRTADGSEFESPKKKAKVE

SEQ ID NO: 7233 - protein, 2096 aa, synthetic construct
MPAAKRVKLDGGDKKYSIGLDIGTNSVGWAVITDEYKVPSKKFKVLGNTDRHSIKKNLIGALLFDSGETAEATRLKRTARRRYTRRKNRICYLQEIFSNEMAKVDDSFFHRLEESFLVEEDKKHERHPIFGNIVDEVAYHEKYPTIYHLRKKLVDSTDKADLRLIYLALAHMIKFRGHFLIEGDLNPDNSDVDKLFIQLVQTYNQLFEENPINASGVDAKAILSARLSKSRRLENLIAQLPGEKKNGLFGNLIALSLGLTPNFKSNFDLAEDAKLQLSKDTYDDDLDNLLAQIGDQYADLFLAAKNLSDAILLSDILRVNTEITKAPLSASMIKRYDEHHQDLTLLKALVRQQLPEKYKEIFFDQSKNGYAGYIDGGASQEEFYKFIKPILEKMDGTEELLVKLNREDLLRKQRTFDNGSIPHQIHLGELHAILRRQEDFYPFLKDNREKIEKILTFRIPYYVGPLARGNSRFAWMTRKSEETITPWNFEEVVDKGASAQSFIERMTNFDKNLPNEKVLPKHSLLYEYFTVYNELTKVKYVTEGMRKPAFLSGEQKKAIVDLLFKTNRKVTVKQLKEDYFKKIECFDSVEISGVEDRFNASLGTYHDLLKIIKDKDFLDNEENEDILEDIVLTLTLFEDREMIEERLKTYAHLFDDKVMKQLKRRRYTGWGRLSRKLINGIRDKQSGKTILDFLKSDGFANRNFMQLIHDDSLTFKEDIQKAQVSGQGDSLHEHIANLAGSPAIKKGILQTVKVVDELVKVMGRHKPENIVIEMARENQTTQKGQKNSRERMKRIEEGIKELGSQILKEHPVENTQLQNEKLYLYYLQNGRDMYVDQELDINRLSDYDVDHIVPQSFLKDDSIDNKVLTRSDKARGKSDNVPSEEVVKKMKNYWRQLLNAKLITQRKFDNLTKAERGGLSELDKAGFIKRQLVETRQITKHVAQILDSRMNTKYDENDKLIREVKVITLKSKLVSDFRKDFQFYKVREINNYHHAHDAYLNAVVGTALIKKYPKLESEFVYGDYKVYDVRKMIAKSEQEIGKATAKYFFYSNIMNFFKTEITLANGEIRKRPLIETNGETGEIVWDKGRDFATVRKVLSMPQVNIVKKTEVQTGGFSKESILPKRNSDKLIARKKDWDPKKYGGFDSPTVAYSVLVVAKVEKGKSKKLKSVKELLGITIMERSSFEKNPIDFLEAKGYKEVKKDLIIKLPKYSLFELENGRKRMLASAGELQKGNELALPSKYVNFLYLASHYEKLKGSPEDNEQKQLFVEQHKHYLDEIIEQISEFSKRVILADANLDKVLSAYNKHRDKPIREQAENIIHLFTLTNLGAPAAFKYFDTTIDRKRYTSTKEVLDATLIHQSITGLYETRIDLSQLGGDGGEAAAKPAPGGSGGTLGIEDEYRLHETSTEPDVSLGSTWLSDFPQAWAETGGMGLAVRQAPLIIPLKATSTPVSIQQYPMSHEARLGIKPHIQRLLDQGILVPCQSPWNTPLLPVKKPGTNDYRPVQDLREVNKRVEDIHPTVPNPYNLLSGLPPSHQWYTVLDLKDAFFCLRLHPTSQPLFAFEWRDPGMGISGQLTWTRLPQGFKNSPTLFNEALHRDLADFRIQHPDLILLQYVDDILLAATSELDCQQGTRALLQTLGDLGYRASAKKAQICQKQVKYLGYLLREGQRWLTEARKETVMGQPVPKTPRQLREFLGTAGFCRLWIPGFAEMAAPLYPLTKPGTLFSWGPDQQKAYQEIKQALLTAPALGLPDLTKPFELFVDEKQGYAKGVLTQKLGPWRRPVAYLSKKLDPVAAGWPPCLRMVAAIAVLTKDAGKLTMGQPLVILAPHAVEALVKQPPDRWLSNARMTHYQAMLLDTDRVQFGPVVALNPATLLPLPEEGAPHDCLEILAETHGTRPDLTDQPIPDADHTWYTDGSSFLQEGQRKAGAAVTTETEVIWAGALPAGTSAQRAELIALTQALKMAEGKRLNVYTDSRYAFATAHIHGEIYRRRGWLTSEGREIKNKSEILALLKALFLPKRLSIIHCLGHQKGDSAEARGNRLADQAAREAAIKTPPDTSTLLAGKRTADGSEFEKRTADGSEFESPKKKAKVE

SEQ ID NO: 7234 - protein, 2096 aa, synthetic construct
MPAAKRVKLDGGDKKYSIGLDIGTNSVGWAVITDEYKVPSKKFKVLGNTDRHSIKKNLIGALLFDSGETAEATRLKRTARRRYTRRKNRICYLQEIFSNEMAKVDDSFFHRLEESFLVEEDKKHERHPIFGNIVDEVAYHEKYPTIYHLRKKLVDSTDKADLRLIYLALAHMIKFRGHFLIEGDLNPDNSDVDKLFIQLVQTYNQLFEENPINASGVDAKAILSARLSKSRRLENLIAQLPGEKKNGLFGNLIALSLGLTPNFKSNFDLAEDAKLQLSKDTYDDDLDNLLAQIGDQYADLFLAAKNLSDAILLSDILRVNTEITKAPLSASMIKRYDEHHQDLTLLKALVRQQLPEKYKEIFFDQSKNGYAGYIDGGASQEEFYKFIKPILEKMDGTEELLVKLNREDLLRKQRTFDNGSIPHQIHLGELHAILRRQEDFYPFLKDNREKIEKILTFRIPYYVGPLARGNSRFAWMTRKSEETITPWNFEEVVDKGASAQSFIERMTNFDKNLPNEKVLPKHSLLYEYFTVYNELTKVKYVTEGMRKPAFLSGEQKKAIVDLLFKTNRKVTVKQLKEDYFKKIECFDSVEISGVEDRFNASLGTYHDLLKIIKDKDFLDNEENEDILEDIVLTLTLFEDREMIEERLKTYAHLFDDKVMKQLKRRRYTGWGRLSRKLINGIRDKQSGKTILDFLKSDGFANRNFMQLIHDDSLTFKEDIQKAQVSGQGDSLHEHIANLAGSPAIKKGILQTVKVVDELVKVMGRHKPENIVIEMARENQTTQKGQKNSRERMKRIEEGIKELGSQILKEHPVENTQLQNEKLYLYYLQNGRDMYVDQELDINRLSDYDVDHIVPQSFLKDDSIDNKVLTRSDKARGKSDNVPSEEVVKKMKNYWRQLLNAKLITQRKFDNLTKAERGGLSELDKAGFIKRQLVETRQITKHVAQILDSRMNTKYDENDKLIREVKVITLKSKLVSDFRKDFQFYKVREINNYHHAHDAYLNAVVGTALIKKYPKLESEFVYGDYKVYDVRKMIAKSEQEIGKATAKYFFYSNIMNFFKTEITLANGEIRKRPLIETNGETGEIVWDKGRDFATVRKVLSMPQVNIVKKTEVQTGGFSKESILPKRNSDKLIARKKDWDPKKYGGFDSPTVAYSVLVVAKVEKGKSKKLKSVKELLGITIMERSSFEKNPIDFLEAKGYKEVKKDLIIKLPKYSLFELENGRKRMLASAGELQKGNELALPSKYVNFLYLASHYEKLKGSPEDNEQKQLFVEQHKHYLDEIIEQISEFSKRVILADANLDKVLSAYNKHRDKPIREQAENIIHLFTLTNLGAPAAFKYFDTTIDRKRYTSTKEVLDATLIHQSITGLYETRIDLSQLGGDGGEAAAKPAPGGSGGTLGIEDEYRLHETSTEPDVSLGSTWLSDFPQAWAETGGMGLAVRQAPLIIPLKATSTPVSIQQYPMSHEARLGIKPHIQRLLDQGILVPCQSPWNTPLLPVKKPGTNDYRPVQDLREVNKRVEDIHPTVPNPYNLLSGLPPSHQWYTVLDLKDAFFCLRLHPTSQPLFAFEWRDPGMGISGQLTWTRLPQGFKNSPTLFDEALHRDLADFRIQHPDLILLQYVDDILLAATSELDCQQGTRALLQTLGDLGYRASAKKAQICQKQVKYLGYLLREGQRWLTEARKETVMGQPVPKTPRQLREFLGTAGFCRLWIPGFAEMAAPLYPLTKTGTLFSWGPDQQKAYQEIKQALLTAPALGLPDLTKPFELFVDEKQGYAKGVLTQKLGPWRRPVAYLSKKLDPVAAGWPPCLRMVAAIAVLTKDAGKLTMGQPLVILAPHAVEALVKQPPDRWLSNARMTHYQAMLLDTDRVQFGPVVALNPATLLPLPEEGAPHDCLEILAETHGTRPDLTDQPIPDADHTWYTDGSSFLQEGQRKAGAAVTTETEVIWAGALPAGTSAQRAELIALTQALKMAEGKRLNVYTDSRYAFATAHIHGEIYRRRGLLTSEGREIKNKSEILALLKALFLPKRLSIIHCLGHQKGDSAEARGNRLADQAAREAAIKTPPDTSTLLAGKRTADGSEFEKRTADGSEFESPKKKAKVE

SEQ ID NO: 7235 - protein, 2096 aa, synthetic construct; identical to SEQ ID NO: 7233

SEQ ID NO: 7236 - protein, 2096 aa, synthetic construct
MPAAKRVKLDGGDKKYSIGLDIGTNSVGWAVITDEYKVPSKKFKVLGNTDRHSIKKNLIGALLFDSGETAEATRLKRTARRRYTRRKNRICYLQEIFSNEMAKVDDSFFHRLEESFLVEEDKKHERHPIFGNIVDEVAYHEKYPTIYHLRKKLVDSTDKADLRLIYLALAHMIKFRGHFLIEGDLNPDNSDVDKLFIQLVQTYNQLFEENPINASGVDAKAILSARLSKSRRLENLIAQLPGEKKNGLFGNLIALSLGLTPNFKSNFDLAEDAKLQLSKDTYDDDLDNLLAQIGDQYADLFLAAKNLSDAILLSDILRVNTEITKAPLSASMIKRYDEHHQDLTLLKALVRQQLPEKYKEIFFDQSKNGYAGYIDGGASQEEFYKFIKPILEKMDGTEELLVKLNREDLLRKQRTFDNGSIPHQIHLGELHAILRRQEDFYPFLKDNREKIEKILTFRIPYYVGPLARGNSRFAWMTRKSEETITPWNFEEVVDKGASAQSFIERMTNFDKNLPNEKVLPKHSLLYEYFTVYNELTKVKYVTEGMRKPAFLSGEQKKAIVDLLFKTNRKVTVKQLKEDYFKKIECFDSVEISGVEDRFNASLGTYHDLLKIIKDKDFLDNEENEDILEDIVLTLTLFEDREMIEERLKTYAHLFDDKVMKQLKRRRYTGWGRLSRKLINGIRDKQSGKTILDFLKSDGFANRNFMQLIHDDSLTFKEDIQKAQVSGQGDSLHEHIANLAGSPAIKKGILQTVKVVDELVKVMGRHKPENIVIEMARENQTTQKGQKNSRERMKRIEEGIKELGSQILKEHPVENTQLQNEKLYLYYLQNGRDMYVDQELDINRLSDYDVDHIVPQSFLKDDSIDNKVLTRSDKARGKSDNVPSEEVVKKMKNYWRQLLNAKLITQRKFDNLTKAERGGLSELDKAGFIKRQLVETRQITKHVAQILDSRMNTKYDENDKLIREVKVITLKSKLVSDFRKDFQFYKVREINNYHHAHDAYLNAVVGTALIKKYPKLESEFVYGDYKVYDVRKMIAKSEQEIGKATAKYFFYSNIMNFFKTEITLANGEIRKRPLIETNGETGEIVWDKGRDFATVRKVLSMPQVNIVKKTEVQTGGFSKESILPKRNSDKLIARKKDWDPKKYGGFDSPTVAYSVLVVAKVEKGKSKKLKSVKELLGITIMERSSFEKNPIDFLEAKGYKEVKKDLIIKLPKYSLFELENGRKRMLASAGELQKGNELALPSKYVNFLYLASHYEKLKGSPEDNEQKQLFVEQHKHYLDEIIEQISEFSKRVILADANLDKVLSAYNKHRDKPIREQAENIIHLFTLTNLGAPAAFKYFDTTIDRKRYTSTKEVLDATLIHQSITGLYETRIDLSQLGGDGGEAAAKPAPGGSGGTLNIEDEYRLHEISTEPDVSPGSTWLSDFPQAWAETGGMGLAVRQAPLIIPLKATSTPVSIKQYPMSQEAKLGIKPHIQRLLDQGILVPCQSPWNTPLLPVKKPGTNDYRPVQGLREVNKRVEDIHPTVPNPYNLLSGLPTSHRWYTVLDLKDAFFCLRLHPTSQPLFASEWRDPGMGISGQLTWTRLPQGFKNSPTLFNEALHRGLADFRIQHPDLILLQYVDDLLLAATSELDCQQGTRALLKTLGNLGYRASAKKAQICQKQVKYLGYLLREGQRWLTEARKETVMGQPTPKTPRQLREFLGKAGFCRLFIPRFAEMAAPLYPLTKPGTLFNWGPDQQKAYHEIKQALLTAPALGLPDLTKPFELFVDEKQGYAKGVLTQKLGPWRRPVAYLSKKLDPVAAGWPPCLRMVAAIAVLTKDAGKLTMGQPLVILAPHAVEALVKQPPDRWLSNARMTHYQAMLLDTDRVQFGPVVALNPATLLPLPEEGAPHDCLEILAETHGTEPDLTDQPIPDADHTWYTDGSSFLQEGQRKAGAAVTTETEVIWARALPAGTSAQRAELIALTQALKMAEGKRLNVYTDSRYAFATAHIHGEIYKRRGWLTSEGREIKNKSEILALLKALFLPKRLSIIHCLGHQKGDSAEARGNRLADQAAREAAIKTPPDTSTLLAGKRTADGSEFEKRTADGSEFESPKKKAKVE

SEQ ID NO: 7237 - protein, 2116 aa, synthetic construct
MPAAKRVKLDGGDKKYSIGLDIGTNSVGWAVITDEYKVPSKKFKVLGNTDRHSIKKNLIGALLFDSGETAEATRLKRTARRRYTRRKNRICYLQEIFSNEMAKVDDSFFHRLEESFLVEEDKKHERHPIFGNIVDEVAYHEKYPTIYHLRKKLVDSTDKADLRLIYLALAHMIKFRGHFLIEGDLNPDNSDVDKLFIQLVQTYNQLFEENPINASGVDAKAILSARLSKSRRLENLIAQLPGEKKNGLFGNLIALSLGLTPNFKSNFDLAEDAKLQLSKDTYDDDLDNLLAQIGDQYADLFLAAKNLSDAILLSDILRVNTEITKAPLSASMIKRYDEHHQDLTLLKALVRQQLPEKYKEIFFDQSKNGYAGYIDGGASQEEFYKFIKPILEKMDGTEELLVKLNREDLLRKQRTFDNGSIPHQIHLGELHAILRRQEDFYPFLKDNREKIEKILTFRIPYYVGPLARGNSRFAWMTRKSEETITPWNFEEVVDKGASAQSFIERMTNFDKNLPNEKVLPKHSLLYEYFTVYNELTKVKYVTEGMRKPAFLSGEQKKAIVDLLFKTNRKVTVKQLKEDYFKKIECFDSVEISGVEDRFNASLGTYHDLLKIIKDKDFLDNEENEDILEDIVLTLTLFEDREMIEERLKTYAHLFDDKVMKQLKRRRYTGWGRLSRKLINGIRDKQSGKTILDFLKSDGFANRNFMQLIHDDSLTFKEDIQKAQVSGQGDSLHEHIANLAGSPAIKKGILQTVKVVDELVKVMGRHKPENIVIEMARENQTTQKGQKNSRERMKRIEEGIKELGSQILKEHPVENTQLQNEKLYLYYLQNGRDMYVDQELDINRLSDYDVDHIVPQSFLKDDSIDNKVLTRSDKARGKSDNVPSEEVVKKMKNYWRQLLNAKLITQRKFDNLTKAERGGLSELDKAGFIKRQLVETRQITKHVAQILDSRMNTKYDENDKLIREVKVITLKSKLVSDFRKDFQFYKVREINNYHHAHDAYLNAVVGTALIKKYPKLESEFVYGDYKVYDVRKMIAKSEQEIGKATAKYFFYSNIMNFFKTEITLANGEIRKRPLIETNGETGEIVWDKGRDFATVRKVLSMPQVNIVKKTEVQTGGFSKESILPKRNSDKLIARKKDWDPKKYGGFDSPTVAYSVLVVAKVEKGKSKKLKSVKELLGITIMERSSFEKNPIDFLEAKGYKEVKKDLIIKLPKYSLFELENGRKRMLASAGELQKGNELALPSKYVNFLYLASHYEKLKGSPEDNEQKQLFVEQHKHYLDEIIEQISEFSKRVILADANLDKVLSAYNKHRDKPIREQAENIIHLFTLTNLGAPAAFKYFDTTIDRKRYTSTKEVLDATLIHQSITGLYETRIDLSQLGGDGGEAAAKPAPGGSGGVQEISDSRPMLHIYLNGRRFLGLLDTGADKTCIAGRDWPANWPIHQTESSLQGLGMACGVARSSQPLRWQHEDKSGIIHPFVIPTLPFTLWGRDIMKDIKVRLMTDSPDDSQDLMIGAIESNLFADQISWKSDQPVWLNQWPLKQEKLQALQQLVTEQLQLGHLEESNSPWNTPVFVIKKKSGKWRLLQDLRAVNATMHDMGALQPGLPSPVAVPKGWEIIIIDLQDCFFNIKLHPEDCKRFAFSVPSPNFKRPYQRFQWKVLPQGMKNSPTLCQKFVDKAILTVRDKYQDSYIVHYMDDILLAHPSRSIVDEILTSMIQALNKHGLVVSTEKIQKYDNLKYLGTHIQGDSVSYQKLQIRTDKLRTLNDFQKLLGNINWIRPFLKLTTGELKPLFEILNGDSNPISTRKLTPEACKALQLMNERLSTARVKRLDLSQPWSLCILKTEYTPTACLWQDGVVEWIHLPHISPKVITPYDIFCTQLIIKGRHRSKELFSKDPDYIVVPYTKVQFDLLLQEKEDWPISLLGFLGEVHFHLPKDPLLTFTLQTAIIFPHMTSTTPLEKGIVIFTDGSANGRSVTYIQGREPIIKENTQNTAQQAEIVAVITAFEEVSQPFNLYTDSKYVTGLFPEIETATLSPRTKIYTELKHLQRLIHKRQEKFYIGHIRGHTGLPGPLAQGNAYADSLTRILTAAGKRTADGSEFEKRTADGSEFESPKKKAKVE

SEQ ID NO: 7238 - protein, 2087 aa, synthetic construct
MPAAKRVKLDGGDKKYSIGLDIGTNSVGWAVITDEYKVPSKKFKVLGNTDRHSIKKNLIGALLFDSGETAEATRLKRTARRRYTRRKNRICYLQEIFSNEMAKVDDSFFHRLEESFLVEEDKKHERHPIFGNIVDEVAYHEKYPTIYHLRKKLVDSTDKADLRLIYLALAHMIKFRGHFLIEGDLNPDNSDVDKLFIQLVQTYNQLFEENPINASGVDAKAILSARLSKSRRLENLIAQLPGEKKNGLFGNLIALSLGLTPNFKSNFDLAEDAKLQLSKDTYDDDLDNLLAQIGDQYADLFLAAKNLSDAILLSDILRVNTEITKAPLSASMIKRYDEHHQDLTLLKALVRQQLPEKYKEIFFDQSKNGYAGYIDGGASQEEFYKFIKPILEKMDGTEELLVKLNREDLLRKQRTFDNGSIPHQIHLGELHAILRRQEDFYPFLKDNREKIEKILTFRIPYYVGPLARGNSRFAWMTRKSEETITPWNFEEVVDKGASAQSFIERMTNFDKNLPNEKVLPKHSLLYEYFTVYNELTKVKYVTEGMRKPAFLSGEQKKAIVDLLFKTNRKVTVKQLKEDYFKKIECFDSVEISGVEDRFNASLGTYHDLLKIIKDKDFLDNEENEDILEDIVLTLTLFEDREMIEERLKTYAHLFDDKVMKQLKRRRYTGWGRLSRKLINGIRDKQSGKTILDFLKSDGFANRNFMQLIHDDSLTFKEDIQKAQVSGQGDSLHEHIANLAGSPAIKKGILQTVKVVDELVKVMGRHKPENIVIEMARENQTTQKGQKNSRERMKRIEEGIKELGSQILKEHPVENTQLQNEKLYLYYLQNGRDMYVDQELDINRLSDYDVDHIVPQSFLKDDSIDNKVLTRSDKARGKSDNVPSEEVVKKMKNYWRQLLNAKLITQRKFDNLTKAERGGLSELDKAGFIKRQLVETRQITKHVAQILDSRMNTKYDENDKLIREVKVITLKSKLVSDFRKDFQFYKVREINNYHHAHDAYLNAVVGTALIKKYPKLESEFVYGDYKVYDVRKMIAKSEQEIGKATAKYFFYSNIMNFFKTEITLANGEIRKRPLIETNGETGEIVWDKGRDFATVRKVLSMPQVNIVKKTEVQTGGFSKESILPKRNSDKLIARKKDWDPKKYGGFDSPTVAYSVLVVAKVEKGKSKKLKSVKELLGITIMERSSFEKNPIDFLEAKGYKEVKKDLIIKLPKYSLFELENGRKRMLASAGELQKGNELALPSKYVNFLYLASHYEKLKGSPEDNEQKQLFVEQHKHYLDEIIEQISEFSKRVILADANLDKVLSAYNKHRDKPIREQAENIIHLFTLTNLGAPAAFKYFDTTIDRKRYTSTKEVLDATLIHQSITGLYETRIDLSQLGGDGGEAAAKPAPGGSGGIPWLMKKPLQLTTLVPLQEYEERLLKQTMLTGSYKEKLQSLFLKYDALWQHWENQVGHRRIKPHHIATGTVNPRPQKQYPINPKAKASIQTVINDLLKQGVLIQQNSIMNTPVYPVPKPDGKWRMVLDYREVNKTIPLIAAQNQHSAGILSSIFRGKYKTTLDLSNGFWAHSITPESYWLTAFTWLGQQYCWTRLPQGFLNSPALFNADVVDLLKEVPNVQVYVDDIYISHDDPREHLEQLEKVFSLLLNAGYVVSLKKSEIAQHEVEFLGFNITKEGRGLTETFKQKLLNITPPRDLKQLQSILGKLNFARNFIPNFSELVKPLYNIIATAPGKYITWTTDNSQQLQNIISMLNSAENLEERNPEVRLIMKVNTSPSAGYIRFYNEFAKRPIMYLNYVYTKAEVKFTNTEKLLTTIHKGLIKALDLGMGQEILVYSPIVSMTKIQKTPLPERKALPIRWITWMSYLEDPRIQFHYDKTLPELQQVPTVTDDIIAKIKHPSEFSMVFYTDGSAIKHPNVNKSHNAGMGIAQVQFKPEFTVINTWSIPLGDHTAQLAEVAAVEFACKKALKIDGPVLIVTDSFYVAESVNKELPYWQSNGFFNNKKKPLKHVSKWKSIADCIQLKPDIIIIHEKGHQPTASTFHTEGNNLADKLATQGSYVVNAGKRTADGSEFEKRTADGSEFESPKKKAKVE

SEQ ID NO: 7239 - protein, 2176 aa, synthetic construct
MPAAKRVKLDGGDKKYSIGLDIGTNSVGWAVITDEYKVPSKKFKVLGNTDRHSIKKNLIGALLFDSGETAEATRLKRTARRRYTRRKNRICYLQEIFSNEMAKVDDSFFHRLEESFLVEEDKKHERHPIFGNIVDEVAYHEKYPTIYHLRKKLVDSTDKADLRLIYLALAHMIKFRGHFLIEGDLNPDNSDVDKLFIQLVQTYNQLFEENPINASGVDAKAILSARLSKSRRLENLIAQLPGEKKNGLFGNLIALSLGLTPNFKSNFDLAEDAKLQLSKDTYDDDLDNLLAQIGDQYADLFLAAKNLSDAILLSDILRVNTEITKAPLSASMIKRYDEHHQDLTLLKALVRQQLPEKYKEIFFDQSKNGYAGYIDGGASQEEFYKFIKPILEKMDGTEELLVKLNREDLLRKQRTFDNGSIPHQIHLGELHAILRRQEDFYPFLKDNREKIEKILTFRIPYYVGPLARGNSRFAWMTRKSEETITPWNFEEVVDKGASAQSFIERMTNFDKNLPNEKVLPKHSLLYEYFTVYNELTKVKYVTEGMRKPAFLSGEQKKAIVDLLFKTNRKVTVKQLKEDYFKKIECFDSVEISGVEDRFNASLGTYHDLLKIIKDKDFLDNEENEDILEDIVLTLTLFEDREMIEERLKTYAHLFDDKVMKQLKRRRYTGWGRLSRKLINGIRDKQSGKTILDFLKSDGFANRNFMQLIHDDSLTFKEDIQKAQVSGQGDSLHEHIANLAGSPAIKKGILQTVKVVDELVKVMGRHKPENIVIEMARENQTTQKGQKNSRERMKRIEEGIKELGSQILKEHPVENTQLQNEKLYLYYLQNGRDMYVDQELDINRLSDYDVDHIVPQSFLKDDSIDNKVLTRSDKARGKSDNVPSEEVVKKMKNYWRQLLNAKLITQRKFDNLTKAERGGLSELDKAGFIKRQLVETRQITKHVAQILDSRMNTKYDENDKLIREVKVITLKSKLVSDFRKDFQFYKVREINNYHHAHDAYLNAVVGTALIKKYPKLESEFVYGDYKVYDVRKMIAKSEQEIGKATAKYFFYSNIMNFFKTEITLANGEIRKRPLIETNGETGEIVWDKGRDFATVRKVLSMPQVNIVKKTEVQTGGFSKESILPKRNSDKLIARKKDWDPKKYGGFDSPTVAYSVLVVAKVEKGKSKKLKSVKELLGITIMERSSFEKNPIDFLEAKGYKEVKKDLIIKLPKYSLFELENGRKRMLASAGELQKGNELALPSKYVNFLYLASHYEKLKGSPEDNEQKQLFVEQHKHYLDEIIEQISEFSKRVILADANLDKVLSAYNKHRDKPIREQAENIIHLFTLTNLGAPAAFKYFDTTIDRKRYTSTKEVLDATLIHQSITGLYETRIDLSQLGGDGGEAAAKPAPGGSGGMDPLQLLQPLEAEIKGTKLKAHWNSGATITCVPQAFLEEEVPIKNIWIKTIHGEKEQPVYYLTFKIQGRKVEAEVISSPYDYILVSPSDIPWLMKKPLQLTTLVPLQEYEERLLKQTMLTGSYKEKLQSLFLKYDALWQHWENQVGHRRIKPHHIATGTVNPRPQKQYPINPKAKASIQTVINDLLKQGVLIQQNSIMNTPVYPVPKPDGKWRMVLDYREVNKTIPLIAAQNQHSAGILSSIFRGKYKTTLDLSNGFWAHSITPESYWLTAFTWLGQQYCWTRLPQGFLNSPALFNADVVDLLKEVPNVQVYVDDIYISHDDPREHLEQLEKVFSLLLNAGYVVSLKKSEIAQHEVEFLGFNITKEGRGLTETFKQKLLNITPPRDLKQLQSILGLLNFARNFIPNFSELVKPLYNIIATAPGKYITWTTDNSQQLQNIISMLNSAENLEERNPEVRLIMKVNTSPSAGYIRFYNEFAKRPIMYLNYVYTKAEVKFTNTEKLLTTIHKGLIKALDLGMGQEILVYSPIVSMTKIQKTPLPERKALPIRWITWMSYLEDPRIQFHYDKTLPELQQVPTVTDDIIAKIKHPSEFSMVFYTDGSAIKHPNVNKSHNAGMGIAQVQFKPEFTVINTWSIPLGDHTAQLAEVAAVEFACKKALKIDGPVLIVTDSFYVAESVNKELPYWQSNGFFNNKKKPLKHVSKWKSIADCIQLKPDIIIIHEKGHQPTASTFHTEGNNLADKLATQGSYVVNAGKRTADGSEFEKRTADGSEFESPKKKAKVE

SEQ ID NO: 7240 - protein, 2094 aa, synthetic construct
MPAAKRVKLDGGDKKYSIGLDIGTNSVGWAVITDEYKVPSKKFKVLGNTDRHSIKKNLIGALLFDSGETAEATRLKRTARRRYTRRKNRICYLQEIFSNEMAKVDDSFFHRLEESFLVEEDKKHERHPIFGNIVDEVAYHEKYPTIYHLRKKLVDSTDKADLRLIYLALAHMIKFRGHFLIEGDLNPDNSDVDKLFIQLVQTYNQLFEENPINASGVDAKAILSARLSKSRRLENLIAQLPGEKKNGLFGNLIALSLGLTPNFKSNFDLAEDAKLQLSKDTYDDDLDNLLAQIGDQYADLFLAAKNLSDAILLSDILRVNTEITKAPLSASMIKRYDEHHQDLTLLKALVRQQLPEKYKEIFFDQSKNGYAGYIDGGASQEEFYKFIKPILEKMDGTEELLVKLNREDLLRKQRTFDNGSIPHQIHLGELHAILRRQEDFYPFLKDNREKIEKILTFRIPYYVGPLARGNSRFAWMTRKSEETITPWNFEEVVDKGASAQSFIERMTNFDKNLPNEKVLPKHSLLYEYFTVYNELTKVKYVTEGMRKPAFLSGEQKKAIVDLLFKTNRKVTVKQLKEDYFKKIECFDSVEISGVEDRFNASLGTYHDLLKIIKDKDFLDNEENEDILEDIVLTLTLFEDREMIEERLKTYAHLFDDKVMKQLKRRRYTGWGRLSRKLINGIRDKQSGKTILDFLKSDGFANRNFMQLIHDDSLTFKEDIQKAQVSGQGDSLHEHIANLAGSPAIKKGILQTVKVVDELVKVMGRHKPENIVIEMARENQTTQKGQKNSRERMKRIEEGIKELGSQILKEHPVENTQLQNEKLYLYYLQNGRDMYVDQELDINRLSDYDVDHIVPQSFLKDDSIDNKVLTRSDKARGKSDNVPSEEVVKKMKNYWRQLLNAKLITQRKFDNLTKAERGGLSELDKAGFIKRQLVETRQITKHVAQILDSRMNTKYDENDKLIREVKVITLKSKLVSDFRKDFQFYKVREINNYHHAHDAYLNAVVGTALIKKYPKLESEFVYGDYKVYDVRKMIAKSEQEIGKATAKYFFYSNIMNFFKTEITLANGEIRKRPLIETNGETGEIVWDKGRDFATVRKVLSMPQVNIVKKTEVQTGGFSKESILPKRNSDKLIARKKDWDPKKYGGFDSPTVAYSVLVVAKVEKGKSKKLKSVKELLGITIMERSSFEKNPIDFLEAKGYKEVKKDLIIKLPKYSLFELENGRKRMLASAGELQKGNELALPSKYVNFLYLASHYEKLKGSPEDNEQKQLFVEQHKHYLDEIIEQISEFSKRVILADANLDKVLSAYNKHRDKPIREQAENIIHLFTLTNLGAPAAFKYFDTTIDRKRYTSTKEVLDATLIHQSITGLYETRIDLSQLGGDGGEAAAKPAPGGSGGVLNLEEEYRLHEKPVPSSIDPSWLQLFPTVWAERAGMGLANQVPPVVVELRSGASPVAVRQYPMSKEAREGIRPHIQRFLDLGVLVPCQSPWNTPLLPVKKPGTNDYRPVQDLREINKRVQDIHPTVPNPYNLLSSLPPSHTWYSVLDLKDAFFCLKLHPNSQPLFAFEWRDPEKGNTGQLTWTRLPQGFKNSPTLFNEALHRDLAPFRALNPQVVLLQYVDDLLVAAPTYRDCKEGTQKLLQELSKLGYRVSAKKAQLCQKEVTYLGYLLKEGKRWLTPARKATVMKIPPPTTPRQVREFLGTAGFCRLWIPGFASLAAPLYPLTKPSIPFIWTEEHQKAFDRIKEALLSAPALALPDLTKPFTLYVDERAGVARGVLTQTLGPWRRPVAYLSKKLDPVASGWPTCLKAVAAVALLLKDADKLTLGQNVTVIASHSLESIVRQPPDRWMTNARMTHYQSLLLNERVSFAPPAVLNPATLLPVESEATPVHRCSEILAEETGTRRDLKDQPLPGVPAWYTDGSSFIAEGKRRAGAAIVDGKRTVWASSLPEGTSAQKAELVALTQALRLAEGKDINIYTDSRYAFATAHIHGAIYKQRGWLTSAGKDIKNKEEILALLEAIHLPKRVAIIHCPGHQKGNDPVATGNRRADEAAKQAALSTRVLAETTKPAGKRTADGSEFEKRTADGSEFESPKKKAKVE

SEQ ID NO: 7241 - protein, 2096 aa, synthetic construct
MPAAKRVKLDGGDKKYSIGLDIGTNSVGWAVITDEYKVPSKKFKVLGNTDRHSIKKNLIGALLFDSGETAEATRLKRTARRRYTRRKNRICYLQEIFSNEMAKVDDSFFHRLEESFLVEEDKKHERHPIFGNIVDEVAYHEKYPTIYHLRKKLVDSTDKADLRLIYLALAHMIKFRGHFLIEGDLNPDNSDVDKLFIQLVQTYNQLFEENPINASGVDAKAILSARLSKSRRLENLIAQLPGEKKNGLFGNLIALSLGLTPNFKSNFDLAEDAKLQLSKDTYDDDLDNLLAQIGDQYADLFLAAKNLSDAILLSDILRVNTEITKAPLSASMIKRYDEHHQDLTLLKALVRQQLPEKYKEIFFDQSKNGYAGYIDGGASQEEFYKFIKPILEKMDGTEELLVKLNREDLLRKQRTFDNGSIPHQIHLGELHAILRRQEDFYPFLKDNREKIEKILTFRIPYYVGPLARGNSRFAWMTRKSEETITPWNFEEVVDKGASAQSFIERMTNFDKNLPNEKVLPKHSLLYEYFTVYNELTKVKYVTEGMRKPAFLSGEQKKAIVDLLFKTNRKVTVKQLKEDYFKKIECFDSVEISGVEDRFNASLGTYHDLLKIIKDKDFLDNEENEDILEDIVLTLTLFEDREMIEERLKTYAHLFDDKVMKQLKRRRYTGWGRLSRKLINGIRDKQSGKTILDFLKSDGFANRNFMQLIHDDSLTFKEDIQKAQVSGQGDSLHEHIANLAGSPAIKKGILQTVKVVDELVKVMGRHKPENIVIEMARENQTTQKGQKNSRERMKRIEEGIKELGSQILKEHPVENTQLQNEKLYLYYLQNGRDMYVDQELDINRLSDYDVDHIVPQSFLKDDSIDNKVLTRSDKARGKSDNVPSEEVVKKMKNYWRQLLNAKLITQRKFDNLTKAERGGLSELDKAGFIKRQLVETRQITKHVAQILDSRMNTKYDENDKLIREVKVITLKSKLVSDFRKDFQFYKVREINNYHHAHDAYLNAVVGTALIKKYPKLESEFVYGDYKVYDVRKMIAKSEQEIGKATAKYFFYSNIMNFFKTEITLANGEIRKRPLIETNGETGEIVWDKGRDFATVRKVLSMPQVNIVKKTEVQTGGFSKESILPKRNSDKLIARKKDWDPKKYGGFDSPTVAYSVLVVAKVEKGKSKKLKSVKELLGITIMERSSFEKNPIDFLEAKGYKEVKKDLIIKLPKYSLFELENGRKRMLASAGELQKGNELALPSKYVNFLYLASHYEKLKGSPEDNEQKQLFVEQHKHYLDEIIEQISEFSKRVILADANLDKVLSAYNKHRDKPIREQAENIIHLFTLTNLGAPAAFKYFDTTIDRKRYTSTKEVLDATLIHQSITGLYETRIDLSQLGGDGGEAAAKPAPGGSGGTLNIEDEYRLHETSKEPDVPLGSTWLSDFPQAWAETGGMGLAVRQAPLIIPLKATSTPVSIKQYPMSQEARLGIKPHIQRLLDQGILVPCQSPWNTPLLPVKKPGTNDYRPVQDLREVNKRVEDIHPTVPNPYNLLSGLPPSHQWYTVLDLKDAFFCLRLHPTSQPLFAFEWRDPEMGISGQLTWTRLPQGFKNSPTLFDEALHRDLADFRIQHPDLILLQYVDDLLLAATSEQDCQRGTRALLQTLGNLGYRASAKKAQICQKQVKYLGYLLKEGQRWLTEARKETVMGQPTPKTPRQLREFLGTAGFCRLWIPGFAEMAAPLYPLTKTGTLFNWGPDQQKAYQEIKQALLTAPALGLPDLTKPFELFVDEKQGYAKGVLTQKLGPWRRPVAYLSKKLDPVAAGWPPCLRMVAAIAVLTKDAGKLTMGQPLVILAPHAVEALVKQPPDRWLSNARMTHYQAMLLDTDRVQFGPVVALNPATLLPLPEKEAPHDCLEILAETHGTRPDLTDQPIPDADYTWYTDGSSFLQEGQRRAGAAVTTETEVIWARALPAGTSAQRAELIALTQALKMAEGKKLNVYTDSRYAFATAHVHGEIYRRRGLLTSEGREIKNKNEILALLKALFLPKRLSIIHCPGHQKGNSAEARGNRMADQAAREAAMKAVLETSTLLAGKRTADGSEFEKRTADGSEFESPKKKAKVE

SEQ ID NO: 7242 - protein, 2096 aa, synthetic construct; identical to SEQ ID NO: 4527

SEQ ID NO: 7243 - protein, 2098 aa, synthetic construct
MPAAKRVKLDGGDKKYSIGLDIGTNSVGWAVITDEYKVPSKKFKVLGNTDRHSIKKNLIGALLFDSGETAEATRLKRTARRRYTRRKNRICYLQEIFSNEMAKVDDSFFHRLEESFLVEEDKKHERHPIFGNIVDEVAYHEKYPTIYHLRKKLVDSTDKADLRLIYLALAHMIKFRGHFLIEGDLNPDNSDVDKLFIQLVQTYNQLFEENPINASGVDAKAILSARLSKSRRLENLIAQLPGEKKNGLFGNLIALSLGLTPNFKSNFDLAEDAKLQLSKDTYDDDLDNLLAQIGDQYADLFLAAKNLSDAILLSDILRVNTEITKAPLSASMIKRYDEHHQDLTLLKALVRQQLPEKYKEIFFDQSKNGYAGYIDGGASQEEFYKFIKPILEKMDGTEELLVKLNREDLLRKQRTFDNGSIPHQIHLGELHAILRRQEDFYPFLKDNREKIEKILTFRIPYYVGPLARGNSRFAWMTRKSEETITPWNFEEVVDKGASAQSFIERMTNFDKNLPNEKVLPKHSLLYEYFTVYNELTKVKYVTEGMRKPAFLSGEQKKAIVDLLFKTNRKVTVKQLKEDYFKKIECFDSVEISGVEDRFNASLGTYHDLLKIIKDKDFLDNEENEDILEDIVLTLTLFEDREMIEERLKTYAHLFDDKVMKQLKRRRYTGWGRLSRKLINGIRDKQSGKTILDFLKSDGFANRNFMQLIHDDSLTFKEDIQKAQVSGQGDSLHEHIANLAGSPAIKKGILQTVKVVDELVKVMGRHKPENIVIEMARENQTTQKGQKNSRERMKRIEEGIKELGSQILKEHPVENTQLQNEKLYLYYLQNGRDMYVDQELDINRLSDYDVDHIVPQSFLKDDSIDNKVLTRSDKARGKSDNVPSEEVVKKMKNYWRQLLNAKLITQRKFDNLTKAERGGLSELDKAGFIKRQLVETRQITKHVAQILDSRMNTKYDENDKLIREVKVITLKSKLVSDFRKDFQFYKVREINNYHHAHDAYLNAVVGTALIKKYPKLESEFVYGDYKVYDVRKMIAKSEQEIGKATAKYFFYSNIMNFFKTEITLANGEIRKRPLIETNGETGEIVWDKGRDFATVRKVLSMPQVNIVKKTEVQTGGFSKESILPKRNSDKLIARKKDWDPKKYGGFDSPTVAYSVLVVAKVEKGKSKKLKSVKELLGITIMERSSFEKNPIDFLEAKGYKEVKKDLIIKLPKYSLFELENGRKRMLASAGELQKGNELALPSKYVNFLYLASHYEKLKGSPEDNEQKQLFVEQHKHYLDEIIEQISEFSKRVILADANLDKVLSAYNKHRDKPIREQAENIIHLFTLTNLGAPAAFKYFDTTIDRKRYTSTKEVLDATLIHQSITGLYETRIDLSQLGGDGGPAPGGSEAAAKGGTAPLEEEYRLFLEAPIQNVTLLEQWKREIPKVWAEINPPGLASTQAPIHVQLLSTALPVRVRQYPITLEAKRSLRETIRKFRAAGILRPVHSPWNTPLLPVRKSGTSEYRMVQDLREVNKRVETIHPTVPNPYTLLSLLPPDRIWYSVLDLKDAFFCIPLAPESQLIFAFEWADAEEGESGQLTWTRLPQGFKNSPTLFDEALNRDLQGFRLDHPSVSLLQYVDDLLIAADTQAACLSATRDLLMTLAELGYRVSGKKAQLCQEEVTYLGFKIHKGSRSLSNSRTQAILQIPVPKTKRQVREFLGTIGYCRLWIPGFAELAQPLYAATRGGNDPLVWGEKEEEAFQSLKLALTQPPALALPSLDKPFQLFVEETSGAAKGVLTQALGPWKRPVAYLSKRLDPVAAGWPRCLRAIAAAALLTREASKLTFGQDIEITSSHNLESLLRSPPDKWLTNARITQYQVLLLDPPRVRFKQTAALNPATLLPETDDTLPIHHCLDTLDSLTSTRPDLTDQPLAQAEATLFTDGSSYIRDGKRYAGAAVVTLDSVIWAEPLPIGTSAQKAELIALTKALEWSKDKSVNIYTDSRYAFATLHVHGMIYRERGLLTAGGKAIKNAPEILALLTAVWLPKRVAVMHCKGHQKDDAPTSTGNRRADEVAREVAIRPLSTQATISAGKRTADGSEFEKRTADGSEFESPKKKAKVE

SEQ ID NO: 7244 - protein, 2098 aa, synthetic construct
MPAAKRVKLDGGDKKYSIGLDIGTNSVGWAVITDEYKVPSKKFKVLGNTDRHSIKKNLIGALLFDSGETAEATRLKRTARRRYTRRKNRICYLQEIFSNEMAKVDDSFFHRLEESFLVEEDKKHERHPIFGNIVDEVAYHEKYPTIYHLRKKLVDSTDKADLRLIYLALAHMIKFRGHFLIEGDLNPDNSDVDKLFIQLVQTYNQLFEENPINASGVDAKAILSARLSKSRRLENLIAQLPGEKKNGLFGNLIALSLGLTPNFKSNFDLAEDAKLQLSKDTYDDDLDNLLAQIGDQYADLFLAAKNLSDAILLSDILRVNTEITKAPLSASMIKRYDEHHQDLTLLKALVRQQLPEKYKEIFFDQSKNGYAGYIDGGASQEEFYKFIKPILEKMDGTEELLVKLNREDLLRKQRTFDNGSIPHQIHLGELHAILRRQEDFYPFLKDNREKIEKILTFRIPYYVGPLARGNSRFAWMTRKSEETITPWNFEEVVDKGASAQSFIERMTNFDKNLPNEKVLPKHSLLYEYFTVYNELTKVKYVTEGMRKPAFLSGEQKKAIVDLLFKTNRKVTVKQLKEDYFKKIECFDSVEISGVEDRFNASLGTYHDLLKIIKDKDFLDNEENEDILEDIVLTLTLFEDREMIEERLKTYAHLFDDKVMKQLKRRRYTGWGRLSRKLINGIRDKQSGKTILDFLKSDGFANRNFMQLIHDDSLTFKEDIQKAQVSGQGDSLHEHIANLAGSPAIKKGILQTVKVVDELVKVMGRHKPENIVIEMARENQTTQKGQKNSRERMKRIEEGIKELGSQILKEHPVENTQLQNEKLYLYYLQNGRDMYVDQELDINRLSDYDVDHIVPQSFLKDDSIDNKVLTRSDKARGKSDNVPSEEVVKKMKNYWRQLLNAKLITQRKFDNLTKAERGGLSELDKAGFIKRQLVETRQITKHVAQILDSRMNTKYDENDKLIREVKVITLKSKLVSDFRKDFQFYKVREINNYHHAHDAYLNAVVGTALIKKYPKLESEFVYGDYKVYDVRKMIAKSEQEIGKATAKYFFYSNIMNFFKTEITLANGEIRKRPLIETNGETGEIVWDKGRDFATVRKVLSMPQVNIVKKTEVQTGGFSKESILPKRNSDKLIARKKDWDPKKYGGFDSPTVAYSVLVVAKVEKGKSKKLKSVKELLGITIMERSSFEKNPIDFLEAKGYKEVKKDLIIKLPKYSLFELENGRKRMLASAGELQKGNELALPSKYVNFLYLASHYEKLKGSPEDNEQKQLFVEQHKHYLDEIIEQISEFSKRVILADANLDKVLSAYNKHRDKPIREQAENIIHLFTLTNLGAPAAFKYFDTTIDRKRYTSTKEVLDATLIHQSITGLYETRIDLSQLGGDGGPAPGGSEAAAKGGTAPLEEEYRLFLEAPIQNVTLLEQWKREIPKVWAEINPPGLASTQAPIHVQLLSTALPVRVRQYPITLEAKRSLRETIRKFRAAGILRPVHSPWNTPLLPVRKSGTSEYRMVQDLREVNKRVETIHPTVPNPYTLLSLLPPDRIWYSVLDLKDAFFCIPLAPESQLIFAFEWADAEEGESGQLTWTRLPQGFKNSPTLFNEALNRDLQGFRLDHPSVSLLQYVDDLLIAADTQAACLSATRDLLMTLAELGYRVSGKKAQLCQEEVTYLGFKIHKGSRSLSNSRTQAILQIPVPKTKRQVREFLGTIGYCRLWIPGFAELAQPLYAATRPGNDPLVWGEKEEEAFQSLKLALTQPPALALPSLDKPFQLFVEETSGAAKGVLTQALGPWKRPVAYLSKRLDPVAAGWPRCLRAIAAAALLTREASKLTFGQDIEITSSHNLESLLRSPPDKWLTNARITQYQVLLLDPPRVRFKQTAALNPATLLPETDDTLPIHHCLDTLDSLTSTRPDLTDQPLAQAEATLFTDGSSYIRDGKRYAGAAVVTLDSVIWAEPLPIGTSAQKAELIALTKALEWSKDKSVNIYTDSRYAFATLHVHGMIYRERGWLTAGGKAIKNAPEILALLTAVWLPKRVAVMHCKGHQKDDAPTSTGNRRADEVAREVAIRPLSTQATISAGKRTADGSEFEKRTADGSEFESPKKKAKVE

SEQ ID NO: 7245 - protein, 2095 aa, synthetic construct
MPAAKRVKLDGGDKKYSIGLDIGTNSVGWAVITDEYKVPSKKFKVLGNTDRHSIKKNLIGALLFDSGETAEATRLKRTARRRYTRRKNRICYLQEIFSNEMAKVDDSFFHRLEESFLVEEDKKHERHPIFGNIVDEVAYHEKYPTIYHLRKKLVDSTDKADLRLIYLALAHMIKFRGHFLIEGDLNPDNSDVDKLFIQLVQTYNQLFEENPINASGVDAKAILSARLSKSRRLENLIAQLPGEKKNGLFGNLIALSLGLTPNFKSNFDLAEDAKLQLSKDTYDDDLDNLLAQIGDQYADLFLAAKNLSDAILLSDILRVNTEITKAPLSASMIKRYDEHHQDLTLLKALVRQQLPEKYKEIFFDQSKNGYAGYIDGGASQEEFYKFIKPILEKMDGTEELLVKLNREDLLRKQRTFDNGSIPHQIHLGELHAILRRQEDFYPFLKDNREKIEKILTFRIPYYVGPLARGNSRFAWMTRKSEETITPWNFEEVVDKGASAQSFIERMTNFDKNLPNEKVLPKHSLLYEYFTVYNELTKVKYVTEGMRKPAFLSGEQKKAIVDLLFKTNRKVTVKQLKEDYFKKIECFDSVEISGVEDRFNASLGTYHDLLKIIKDKDFLDNEENEDILEDIVLTLTLFEDREMIEERLKTYAHLFDDKVMKQLKRRRYTGWGRLSRKLINGIRDKQSGKTILDFLKSDGFANRNFMQLIHDDSLTFKEDIQKAQVSGQGDSLHEHIANLAGSPAIKKGILQTVKVVDELVKVMGRHKPENIVIEMARENQTTQKGQKNSRERMKRIEEGIKELGSQILKEHPVENTQLQNEKLYLYYLQNGRDMYVDQELDINRLSDYDVDHIVPQSFLKDDSIDNKVLTRSDKARGKSDNVPSEEVVKKMKNYWRQLLNAKLITQRKFDNLTKAERGGLSELDKAGFIKRQLVETRQITKHVAQILDSRMNTKYDENDKLIREVKVITLKSKLVSDFRKDFQFYKVREINNYHHAHDAYLNAVVGTALIKKYPKLESEFVYGDYKVYDVRKMIAKSEQEIGKATAKYFFYSNIMNFFKTEITLANGEIRKRPLIETNGETGEIVWDKGRDFATVRKVLSMPQVNIVKKTEVQTGGFSKESILPKRNSDKLIARKKDWDPKKYGGFDSPTVAYSVLVVAKVEKGKSKKLKSVKELLGITIMERSSFEKNPIDFLEAKGYKEVKKDLIIKLPKYSLFELENGRKRMLASAGELQKGNELALPSKYVNFLYLASHYEKLKGSPEDNEQKQLFVEQHKHYLDEIIEQISEFSKRVILADANLDKVLSAYNKHRDKPIREQAENIIHLFTLTNLGAPAAFKYFDTTIDRKRYTSTKEVLDATLIHQSITGLYETRIDLSQLGGDGGPAPGGSEAAAKGGTLQLEEEYRLFEPESTQKQEMDIWLKNFPQAWAETGGMGTAHCQAPVLIQLKATATPISIRQYPMPHEAYQGIKPHIRRMLDQGILKPCQSPWNTPLLPVKKPGTEDYRPVQDLREVNKRVEDIHPTVPNPYNLLSTLPPSHPWYTVLDLKDAFFCLRLHSESQLLFAFEWRDPEIGLSGQLTWTRLPQGFKNSPTLFNEALHSDLADFRVRYPALVLLQYVDDLLLAAATRTECLEGTKALLETLGNKGYRASAKKAQICLQEVTYLGYSLKDGQRWLTKARKEAILSIPVPKNSRQVREFLGTAGYCRLWIPGFAELAAPLYPLTRPGTLFQWGTEQQLAFEDIKKALLSSPALGLPDITKPFELFIDENSGFAKGVLVQKLGPWKRPVAYLSKKLDTVASGWPPCLRMVAAIAILVKDAGKLTLGQPLTILTSHPVEALVRQPPNKWLSNARMTHYQAMLLDAERVHFGPTVSLNPATLLPLPSGGNHHDCLQILAETHGTRPDLTDQPLPDADLTWYTDGSSFIRNGEREAGAAVTTESEVIWAAPLPPGTSAQRAELIALTQALKMAEGKKLTVYTDSRYAFATTHVHGEIYRRRGWLTSEGKEIKNKNEILALLEALFLPKRLSIIHCPGHQKGDSPQAKGNRLADDTAKKAATETHSSLTVLPAGKRTADGSEFEKRTADGSEFESPKKKAKVE

SEQ ID NO: 7246 - protein, 2096 aa, synthetic construct
MPAAKRVKLDGGDKKYSIGLDIGTNSVGWAVITDEYKVPSKKFKVLGNTDRHSIKKNLIGALLFDSGETAEATRLKRTARRRYTRRKNRICYLQEIFSNEMAKVDDSFFHRLEESFLVEEDKKHERHPIFGNIVDEVAYHEKYPTIYHLRKKLVDSTDKADLRLIYLALAHMIKFRGHFLIEGDLNPDNSDVDKLFIQLVQTYNQLFEENPINASGVDAKAILSARLSKSRRLENLIAQLPGEKKNGLFGNLIALSLGLTPNFKSNFDLAEDAKLQLSKDTYDDDLDNLLAQIGDQYADLFLAAKNLSDAILLSDILRVNTEITKAPLSASMIKRYDEHHQDLTLLKALVRQQLPEKYKEIFFDQSKNGYAGYIDGGASQEEFYKFIKPILEKMDGTEELLVKLNREDLLRKQRTFDNGSIPHQIHLGELHAILRRQEDFYPFLKDNREKIEKILTFRIPYYVGPLARGNSRFAWMTRKSEETITPWNFEEVVDKGASAQSFIERMTNFDKNLPNEKVLPKHSLLYEYFTVYNELTKVKYVTEGMRKPAFLSGEQKKAIVDLLFKTNRKVTVKQLKEDYFKKIECFDSVEISGVEDRFNASLGTYHDLLKIIKDKDFLDNEENEDILEDIVLTLTLFEDREMIEERLKTYAHLFDDKVMKQLKRRRYTGWGRLSRKLINGIRDKQSGKTILDFLKSDGFANRNFMQLIHDDSLTFKEDIQKAQVSGQGDSLHEHIANLAGSPAIKKGILQTVKVVDELVKVMGRHKPENIVIEMARENQTTQKGQKNSRERMKRIEEGIKELGSQILKEHPVENTQLQNEKLYLYYLQNGRDMYVDQELDINRLSDYDVDHIVPQSFLKDDSIDNKVLTRSDKARGKSDNVPSEEVVKKMKNYWRQLLNAKLITQRKFDNLTKAERGGLSELDKAGFIKRQLVETRQITKHVAQILDSRMNTKYDENDKLIREVKVITLKSKLVSDFRKDFQFYKVREINNYHHAHDAYLNAVVGTALIKKYPKLESEFVYGDYKVYDVRKMIAKSEQEIGKATAKYFFYSNIMNFFKTEITLANGEIRKRPLIETNGETGEIVWDKGRDFATVRKVLSMPQVNIVKKTEVQTGGFSKESILPKRNSDKLIARKKDWDPKKYGGFDSPTVAYSVLVVAKVEKGKSKKLKSVKELLGITIMERSSFEKNPIDFLEAKGYKEVKKDLIIKLPKYSLFELENGRKRMLASAGELQKGNELALPSKYVNFLYLASHYEKLKGSPEDNEQKQLFVEQHKHYLDEIIEQISEFSKRVILADANLDKVLSAYNKHRDKPIREQAENIIHLFTLTNLGAPAAFKYFDTTIDRKRYTSTKEVLDATLIHQSITGLYETRIDLSQLGGDGGPAPGGSEAAAKGGTLGIEDEYRLHETSTEPDVSLGSTWLSDFPQAWAETGGMGLAVRQAPLIIPLKATSTPVSIQQYPMSHEARLGIKPHIQRLLDQGILVPCQSPWNTPLLPVKKPGTNDYRPVQDLREVNKRVEDIHPTVPNPYNLLSGLPPSHQWYTVLDLKDAFFCLRLHPTSQPLFAFEWRDPGMGISGQLTWTRLPQGFKNSPTLFNEALHRDLADFRIQHPDLILLQYVDDILLAATSELDCQQGTRALLQTLGDLGYRASAKKAQICQKQVKYLGYLLREGQRWLTEARKETVMGQPVPKTPRQLREFLGTAGFCRLWIPGFAEMAAPLYPLTKPGTLFSWGPDQQKAYQEIKQALLTAPALGLPDLTKPFELFVDEKQGYAKGVLTQKLGPWRRPVAYLSKKLDPVAAGWPPCLRMVAAIAVLTKDAGKLTMGQPLVILAPHAVEALVKQPPDRWLSNARMTHYQAMLLDTDRVQFGPVVALNPATLLPLPEEGAPHDCLEILAETHGTRPDLTDQPIPDADHTWYTDGSSFLQEGQRKAGAAVTTETEVIWAGALPAGTSAQRAELIALTQALKMAEGKRLNVYTDSRYAFATAHIHGEIYRRRGWLTSEGREIKNKSEILALLKALFLPKRLSIIHCLGHQKGDSAEARGNRLADQAAREAAIKTPPDTSTLLAGKRTADGSEFEKRTADGSEFESPKKKAKVE

SEQ ID NO: 7247 - protein, 2096 aa, synthetic construct
MPAAKRVKLDGGDKKYSIGLDIGTNSVGWAVITDEYKVPSKKFKVLGNTDRHSIKKNLIGALLFDSGETAEATRLKRTARRRYTRRKNRICYLQEIFSNEMAKVDDSFFHRLEESFLVEEDKKHERHPIFGNIVDEVAYHEKYPTIYHLRKKLVDSTDKADLRLIYLALAHMIKFRGHFLIEGDLNPDNSDVDKLFIQLVQTYNQLFEENPINASGVDAKAILSARLSKSRRLENLIAQLPGEKKNGLFGNLIALSLGLTPNFKSNFDLAEDAKLQLSKDTYDDDLDNLLAQIGDQYADLFLAAKNLSDAILLSDILRVNTEITKAPLSASMIKRYDEHHQDLTLLKALVRQQLPEKYKEIFFDQSKNGYAGYIDGGASQEEFYKFIKPILEKMDGTEELLVKLNREDLLRKQRTFDNGSIPHQIHLGELHAILRRQEDFYPFLKDNREKIEKILTFRIPYYVGPLARGNSRFAWMTRKSEETITPWNFEEVVDKGASAQSFIERMTNFDKNLPNEKVLPKHSLLYEYFTVYNELTKVKYVTEGMRKPAFLSGEQKKAIVDLLFKTNRKVTVKQLKEDYFKKIECFDSVEISGVEDRFNASLGTYHDLLKIIKDKDFLDNEENEDILEDIVLTLTLFEDREMIEERLKTYAHLFDDKVMKQLKRRRYTGWGRLSRKLINGIRDKQSGKTILDFLKSDGFANRNFMQLIHDDSLTFKEDIQKAQVSGQGDSLHEHIANLAGSPAIKKGILQTVKVVDELVKVMGRHKPENIVIEMARENQTTQKGQKNSRERMKRIEEGIKELGSQILKEHPVENTQLQNEKLYLYYLQNGRDMYVDQELDINRLSDYDVDHIVPQSFLKDDSIDNKVLTRSDKARGKSDNVPSEEVVKKMKNYWRQLLNAKLITQRKFDNLTKAERGGLSELDKAGFIKRQLVETRQITKHVAQILDSRMNTKYDENDKLIREVKVITLKSKLVSDFRKDFQFYKVREINNYHHAHDAYLNAVVGTALIKKYPKLESEFVYGDYKVYDVRKMIAKSEQEIGKATAKYFFYSNIMNFFKTEITLANGEIRKRPLIETNGETGEIVWDKGRDFATVRKVLSMPQVNIVKKTEVQTGGFSKESILPKRNSDKLIARKKDWDPKKYGGFDSPTVAYSVLVVAKVEKGKSKKLKSVKELLGITIMERSSFEKNPIDFLEAKGYKEVKKDLIIKLPKYSLFELENGRKRMLASAGELQKGNELALPSKYVNFLYLASHYEKLKGSPEDNEQKQLFVEQHKHYLDEIIEQISEFSKRVILADANLDKVLSAYNKHRDKPIREQAENIIHLFTLTNLGAPAAFKYFDTTIDRKRYTSTKEVLDATLIHQSITGLYETRIDLSQLGGDGGPAPGGSEAAAKGGTLNIEDEYRLHETSKGPDVPLGSTWLSDFPQAWAETGGMGLAVRQAPLIIPLKATSTPVSIKQYPMSQEARLGIKPHIQRLLDQGILVPCQSPWNTPLLPVKKPGTNDYRPVQDLREVNKRVEDIHPTVPNPYNLLSGLPPSHQWYTVLDLKDAFFCLRLHPTSQSLFAFEWRDPEMGISGQLTWTRLPQGFKNSPTLFDEALHRDLADFRIQHPDLILLQYVDDLLLAATSELDCQQGTRALLQTLGDLGYRASAKKAQICQKQVKYLGYLLKEGQRWLTEARKETVMGQPTPKTPRQLREFLGTAGFCRLWIPGFAEMAAPLYPLTKTGTLFEWGPDQQKAYQEIKQALLTAPALGLPDLTKPFELFVDEKQGYAKGVLTQKLGPWRRPVAYLSKKLDPVAAGWPPCLRMVAAIAVLTKDAGKLTMGQPLVILAPHAVEALVKQPPDRWLSNARMTHYQALLLDTDRVQFGPIVALNPATLLPLPEEGLQHDCLDILAEAHGTRPDLTDQPLPDADHTWYTDGSSFLQEGQRKAGAAVTTETEVVWAKALPAGTSAQRAELIALTQALKMAEGKKLNVYTDSRYAFATAHIHGEIYRRRGLLTSEGKEIKNKDEILALLKALFLPKRLSIIHCPGHQKGNRAEARGNRMADQAAREVATRETPETSTLLAGKRTADGSEFEKRTADGSEFESPKKKAKVE

SEQ ID NO: 7248 - protein, 2090 aa, synthetic construct
MPAAKRVKLDGGDKKYSIGLDIGTNSVGWAVITDEYKVPSKKFKVLGNTDRHSIKKNLIGALLFDSGETAEATRLKRTARRRYTRRKNRICYLQEIFSNEMAKVDDSFFHRLEESFLVEEDKKHERHPIFGNIVDEVAYHEKYPTIYHLRKKLVDSTDKADLRLIYLALAHMIKFRGHFLIEGDLNPDNSDVDKLFIQLVQTYNQLFEENPINASGVDAKAILSARLSKSRRLENLIAQLPGEKKNGLFGNLIALSLGLTPNFKSNFDLAEDAKLQLSKDTYDDDLDNLLAQIGDQYADLFLAAKNLSDAILLSDILRVNTEITKAPLSASMIKRYDEHHQDLTLLKALVRQQLPEKYKEIFFDQSKNGYAGYIDGGASQEEFYKFIKPILEKMDGTEELLVKLNREDLLRKQRTFDNGSIPHQIHLGELHAILRRQEDFYPFLKDNREKIEKILTFRIPYYVGPLARGNSRFAWMTRKSEETITPWNFEEVVDKGASAQSFIERMTNFDKNLPNEKVLPKHSLLYEYFTVYNELTKVKYVTEGMRKPAFLSGEQKKAIVDLLFKTNRKVTVKQLKEDYFKKIECFDSVEISGVEDRFNASLGTYHDLLKIIKDKDFLDNEENEDILEDIVLTLTLFEDREMIEERLKTYAHLFDDKVMKQLKRRRYTGWGRLSRKLINGIRDKQSGKTILDFLKSDGFANRNFMQLIHDDSLTFKEDIQKAQVSGQGDSLHEHIANLAGSPAIKKGILQTVKVVDELVKVMGRHKPENIVIEMARENQTTQKGQKNSRERMKRIEEGIKELGSQILKEHPVENTQLQNEKLYLYYLQNGRDMYVDQELDINRLSDYDVDHIVPQSFLKDDSIDNKVLTRSDKARGKSDNVPSEEVVKKMKNYWRQLLNAKLITQRKFDNLTKAERGGLSELDKAGFIKRQLVETRQITKHVAQILDSRMNTKYDENDKLIREVKVITLKSKLVSDFRKDFQFYKVREINNYHHAHDAYLNAVVGTALIKKYPKLESEFVYGDYKVYDVRKMIAKSEQEIGKATAKYFFYSNIMNFFKTEITLANGEIRKRPLIETNGETGEIVWDKGRDFATVRKVLSMPQVNIVKKTEVQTGGFSKESILPKRNSDKLIARKKDWDPKKYGGFDSPTVAYSVLVVAKVEKGKSKKLKSVKELLGITIMERSSFEKNPIDFLEAKGYKEVKKDLIIKLPKYSLFELENGRKRMLASAGELQKGNELALPSKYVNFLYLASHYEKLKGSPEDNEQKQLFVEQHKHYLDEIIEQISEFSKRVILADANLDKVLSAYNKHRDKPIREQAENIIHLFTLTNLGAPAAFKYFDTTIDRKRYTSTKEVLDATLIHQSITGLYETRIDLSQLGGDGGPAPGGSEAAAKGGTLQLDDEYRLYSPLVKPDQNIQFWLEQFPQAWAETAGMGLAKQVPPQVIQLKASATPVSVRQYPLSKEAQEGIRPHVQRLIQQGILVPVQSPWNTPLLPVRKPGTNDYRPVQDLREVNKRVQDIHPTVPNPYNLLCALPPQRSWYTVLDLKDAFFCLRLHPTSQPLFAFEWRDPGTGRTGQLTWTRLPQGFKNSPTIFDEALHRDLANFRIQHPQVTLLQYVDDLLLAGATKQDCLEGTKALLLELSDLGYRASAKKAQICRREVTYLGYSLRDGQRWLTEARKKTVVQIPAPTTAKQVREFLGTAGFCRLWIPGFATLAAPLYPLTKEKGEFSWAPEHQKAFDAIKKALLSAPALALPDVTKPFTLYVDERKGVARGVLTQTLGPWRRPVAYLSKKLDPVASGWPVCLKAIAAVAILVKDADKLTLGQNITVIAPHALENIVRQPPDRWMTNARMTHYQSLLLTERVTFAPPAALNPATLLPEETDEPVTHDCHQLLIEETGVRKDLTDIPLTGEVLTWFTDGSSYVVEGKRMAGAAVVDGTRTIWASSLPEGTSAQKAELMALTQALRLAEGKSINIYTDSRYAFATAHVHGAIYKQRGLLTSAGREIKNKEEILSLLEALHLPKRLAIIHCPGHQKAKDPISRGNQMADRVAKQAAQGVNLLAGKRTADGSEFEKRTADGSEFESPKKKAKVE

SEQ ID NO: 7249 - protein, 2176 aa, synthetic construct
MPAAKRVKLDGGDKKYSIGLDIGTNSVGWAVITDEYKVPSKKFKVLGNTDRHSIKKNLIGALLFDSGETAEATRLKRTARRRYTRRKNRICYLQEIFSNEMAKVDDSFFHRLEESFLVEEDKKHERHPIFGNIVDEVAYHEKYPTIYHLRKKLVDSTDKADLRLIYLALAHMIKFRGHFLIEGDLNPDNSDVDKLFIQLVQTYNQLFEENPINASGVDAKAILSARLSKSRRLENLIAQLPGEKKNGLFGNLIALSLGLTPNFKSNFDLAEDAKLQLSKDTYDDDLDNLLAQIGDQYADLFLAAKNLSDAILLSDILRVNTEITKAPLSASMIKRYDEHHQDLTLLKALVRQQLPEKYKEIFFDQSKNGYAGYIDGGASQEEFYKFIKPILEKMDGTEELLVKLNREDLLRKQRTFDNGSIPHQIHLGELHAILRRQEDFYPFLKDNREKIEKILTFRIPYYVGPLARGNSRFAWMTRKSEETITPWNFEEVVDKGASAQSFIERMTNFDKNLPNEKVLPKHSLLYEYFTVYNELTKVKYVTEGMRKPAFLSGEQKKAIVDLLFKTNRKVTVKQLKEDYFKKIECFDSVEISGVEDRFNASLGTYHDLLKIIKDKDFLDNEENEDILEDIVLTLTLFEDREMIEERLKTYAHLFDDKVMKQLKRRRYTGWGRLSRKLINGIRDKQSGKTILDFLKSDGFANRNFMQLIHDDSLTFKEDIQKAQVSGQGDSLHEHIANLAGSPAIKKGILQTVKVVDELVKVMGRHKPENIVIEMARENQTTQKGQKNSRERMKRIEEGIKELGSQILKEHPVENTQLQNEKLYLYYLQNGRDMYVDQELDINRLSDYDVDHIVPQSFLKDDSIDNKVLTRSDKARGKSDNVPSEEVVKKMKNYWRQLLNAKLITQRKFDNLTKAERGGLSELDKAGFIKRQLVETRQITKHVAQILDSRMNTKYDENDKLIREVKVITLKSKLVSDFRKDFQFYKVREINNYHHAHDAYLNAVVGTALIKKYPKLESEFVYGDYKVYDVRKMIAKSEQEIGKATAKYFFYSNIMNFFKTEITLANGEIRKRPLIETNGETGEIVWDKGRDFATVRKVLSMPQVNIVKKTEVQTGGFSKESILPKRNSDKLIARKKDWDPKKYGGFDSPTVAYSVLVVAKVEKGKSKKLKSVKELLGITIMERSSFEKNPIDFLEAKGYKEVKKDLIIKLPKYSLFELENGRKRMLASAGELQKGNELALPSKYVNFLYLASHYEKLKGSPEDNEQKQLFVEQHKHYLDEIIEQISEFSKRVILADANLDKVLSAYNKHRDKPIREQAENIIHLFTLTNLGAPAAFKYFDTTIDRKRYTSTKEVLDATLIHQSITGLYETRIDLSQLGGDGGPAPGGSEAAAKGGMDPLQLLQPLEAEIKGTKLKAHWNSGATITCVPEAFLEDERPIQTMLIKTIHGEKQQDVYYLTFKVQGRKVEAEVLASPYDYILLNPSDVPWLMKKPLQLTVLVPLHEYQERLLQQTALPKEQKELLQKLFLKYDALWQHWENQVGHRRIKPHNIATGTLAPRPQKQYPINPKAKPSIQIVIDDLLKQGVLIQQNSTMNTPVYPVPKPDGKWRMVLDYREVNKTIPLIAAQNQHSAGILSSIYRGKYKTTLDLTNGFWAHPITPESYWLTAFTWQGKQYCWTRLPQGFLNSPALFTADVVDLLKEIPNVQAYVDDIYISHDDPQEHLEQLEKIFSILLNAGYVVSLKKSEIAQREVEFLGFNITKEGRGLTDTFKQKLLNITPPKDLKQLQSILGLLNFARNFIPNYSELVKPLYTIVANANGKFISWTEDNSNQLQHIISVLNQADNLEERNPETRLIIKVNSSPSAGYIRYYNEGSKRPIMYVNYIFSKAEAKFTQTEKLLTTMHKGLIKAMDLAMGQEILVYSPIVSMTKIQRTPLPERKALPVRWITWMTYLEDPRIQFHYDKSLPELQQIPNVTEDVIAKTKHPSEFAMVFYTDGSAIKHPDVNKSHSAGMGIAQVQFIPEYKIVHQWSIPLGDHTAQLAEIAAVEFACKKALKISGPVLIVTDSFYVAESANKELPYWKSNGFLNNKKKPLRHVSKWKSIAECLQLKPDIIIMHEKGHQQPMTTLHTEGNNLADKLATQGSYVVHAGKRTADGSEFEKRTADGSEFESPKKKAKVE

SEQ ID NO: 7250 - protein, 2094 aa, synthetic construct
MPAAKRVKLDGGDKKYSIGLDIGTNSVGWAVITDEYKVPSKKFKVLGNTDRHSIKKNLIGALLFDSGETAEATRLKRTARRRYTRRKNRICYLQEIFSNEMAKVDDSFFHRLEESFLVEEDKKHERHPIFGNIVDEVAYHEKYPTIYHLRKKLVDSTDKADLRLIYLALAHMIKFRGHFLIEGDLNPDNSDVDKLFIQLVQTYNQLFEENPINASGVDAKAILSARLSKSRRLENLIAQLPGEKKNGLFGNLIALSLGLTPNFKSNFDLAEDAKLQLSKDTYDDDLDNLLAQIGDQYADLFLAAKNLSDAILLSDILRVNTEITKAPLSASMIKRYDEHHQDLTLLKALVRQQLPEKYKEIFFDQSKNGYAGYIDGGASQEEFYKFIKPILEKMDGTEELLVKLNREDLLRKQRTFDNGSIPHQIHLGELHAILRRQEDFYPFLKDNREKIEKILTFRIPYYVGPLARGNSRFAWMTRKSEETITPWNFEEVVDKGASAQSFIERMTNFDKNLPNEKVLPKHSLLYEYFTVYNELTKVKYVTEGMRKPAFLSGEQKKAIVDLLFKTNRKVTVKQLKEDYFKKIECFDSVEISGVEDRFNASLGTYHDLLKIIKDKDFLDNEENEDILEDIVLTLTLFEDREMIEERLKTYAHLFDDKVMKQLKRRRYTGWGRLSRKLINGIRDKQSGKTILDFLKSDGFANRNFMQLIHDDSLTFKEDIQKAQVSGQGDSLHEHIANLAGSPAIKKGILQTVKVVDELVKVMGRHKPENIVIEMARENQTTQKGQKNSRERMKRIEEGIKELGSQILKEHPVENTQLQNEKLYLYYLQNGRDMYVDQELDINRLSDYDVDHIVPQSFLKDDSIDNKVLTRSDKARGKSDNVPSEEVVKKMKNYWRQLLNAKLITQRKFDNLTKAERGGLSELDKAGFIKRQLVETRQITKHVAQILDSRMNTKYDENDKLIREVKVITLKSKLVSDFRKDFQFYKVREINNYHHAHDAYLNAVVGTALIKKYPKLESEFVYGDYKVYDVRKMIAKSEQEIGKATAKYFFYSNIMNFFKTEITLANGEIRKRPLIETNGETGEIVWDKGRDFATVRKVLSMPQVNIVKKTEVQTGGFSKESILPKRNSDKLIARKKDWDPKKYGGFDSPTVAYSVLVVAKVEKGKSKKLKSVKELLGITIMERSSFEKNPIDFLEAKGYKEVKKDLIIKLPKYSLFELENGRKRMLASAGELQKGNELALPSKYVNFLYLASHYEKLKGSPEDNEQKQLFVEQHKHYLDEIIEQISEFSKRVILADANLDKVLSAYNKHRDKPIREQAENIIHLFTLTNLGAPAAFKYFDTTIDRKRYTSTKEVLDATLIHQSITGLYETRIDLSQLGGDGGPAPGGSEAAAKGGVLNLEEEYRLHEKPVPSSIDPSWLQLFPTVWAERAGMGLANQVPPVVVELRSGASPVAVRQYPMSKEAREGIRPHIQRFLDLGVLVPCQSPWNTPLLPVKKPGTNDYRPVQDLREINKRVQDIHPTVPNPYNLLSSLPPSHTWYSVLDLKDAFFCLKLHPNSQPLFAFEWRDPEKGNTGQLTWTRLPQGFKNSPTLFNEALHRDLAPFRALNPQVVLLQYVDDLLVAAPTYRDCKEGTQKLLQELSKLGYRVSAKKAQLCQKEVTYLGYLLKEGKRWLTPARKATVMKIPPPTTPRQVREFLGKAGFCRLFIPGFASLAAPLYPLTKPSIPFIWTEEHQKAFDRIKEALLSAPALALPDLTKPFTLYVDERAGVARGVLTQTLGPWRRPVAYLSKKLDPVASGWPTCLKAVAAVALLLKDADKLTLGQNVTVIASHSLESIVRQPPDRWMTNARMTHYQSLLLNERVSFAPPAVLNPATLLPVESEATPVHRCSEILAEETGTRRDLKDQPLPGVPAWYTDGSSFIAEGKRRAGAAIVDGKRTVWASSLPEGTSAQKAELVALTQALRLAEGKDINIYTDSRYAFATAHIHGAIYKQRGWLTSAGKDIKNKEEILALLEAIHLPKRVAIIHCPGHQKGNDPVATGNRRADEAAKQAALSTRVLAETTKPAGKRTADGSEFEKRTADGSEFESPKKKAKVE

SEQ ID NO: 7251 - protein, 2096 aa, synthetic construct
MPAAKRVKLDGGDKKYSIGLDIGTNSVGWAVITDEYKVPSKKFKVLGNTDRHSIKKNLIGALLFDSGETAEATRLKRTARRRYTRRKNRICYLQEIFSNEMAKVDDSFFHRLEESFLVEEDKKHERHPIFGNIVDEVAYHEKYPTIYHLRKKLVDSTDKADLRLIYLALAHMIKFRGHFLIEGDLNPDNSDVDKLFIQLVQTYNQLFEENPINASGVDAKAILSARLSKSRRLENLIAQLPGEKKNGLFGNLIALSLGLTPNFKSNFDLAEDAKLQLSKDTYDDDLDNLLAQIGDQYADLFLAAKNLSDAILLSDILRVNTEITKAPLSASMIKRYDEHHQDLTLLKALVRQQLPEKYKEIFFDQSKNGYAGYIDGGASQEEFYKFIKPILEKMDGTEELLVKLNREDLLRKQRTFDNGSIPHQIHLGELHAILRRQEDFYPFLKDNREKIEKILTFRIPYYVGPLARGNSRFAWMTRKSEETITPWNFEEVVDKGASAQSFIERMTNFDKNLPNEKVLPKHSLLYEYFTVYNELTKVKYVTEGMRKPAFLSGEQKKAIVDLLFKTNRKVTVKQLKEDYFKKIECFDSVEISGVEDRFNASLGTYHDLLKIIKDKDFLDNEENEDILEDIVLTLTLFEDREMIEERLKTYAHLFDDKVMKQLKRRRYTGWGRLSRKLINGIRDKQSGKTILDFLKSDGFANRNFMQLIHDDSLTFKEDIQKAQVSGQGDSLHEHIANLAGSPAIKKGILQTVKVVDELVKVMGRHKPENIVIEMARENQTTQKGQKNSRERMKRIEEGIKELGSQILKEHPVENTQLQNEKLYLYYLQNGRDMYVDQELDINRLSDYDVDHIVPQSFLKDDSIDNKVLTRSDKARGKSDNVPSEEVVKKMKNYWRQLLNAKLITQRKFDNLTKAERGGLSELDKAGFIKRQLVETRQITKHVAQILDSRMNTKYDENDKLIREVKVITLKSKLVSDFRKDFQFYKVREINNYHHAHDAYLNAVVGTALIKKYPKLESEFVYGDYKVYDVRKMIAKSEQEIGKATAKYFFYSNIMNFFKTEITLANGEIRKRPLIETNGETGEIVWDKGRDFATVRKVLSMPQVNIVKKTEVQTGGFSKESILPKRNSDKLIARKKDWDPKKYGGFDSPTVAYSVLVVAKVEKGKSKKLKSVKELLGITIMERSSFEKNPIDFLEAKGYKEVKKDLIIKLPKYSLFELENGRKRMLASAGELQKGNELALPSKYVNFLYLASHYEKLKGSPEDNEQKQLFVEQHKHYLDEIIEQISEFSKRVILADANLDKVLSAYNKHRDKPIREQAENIIHLFTLTNLGAPAAFKYFDTTIDRKRYTSTKEVLDATLIHQSITGLYETRIDLSQLGGDGGPAPGGSEAAAKGGTLNIEDEYRLHETSKEPDVPLGSTWLSDFPQAWAETGGMGLAVRQAPLIIPLKATSTPVSIKQYPMSQEARLGIKPHIQRLLDQGILVPCQSPWNTPLLPVKKPGTNDYRPVQDLREVNKRVEDIHPTVPNPYNLLSGLPPSHQWYTVLDLKDAFFCLRLHPTSQPLFAFEWRDPEMGISGQLTWTRLPQGFKNSPTLFDEALHRDLADFRIQHPDLILLQYVDDLLLAATSEQDCQRGTRALLQTLGNLGYRASAKKAQICQKQVKYLGYLLKEGQRWLTEARKETVMGQPTPKTPRQLREFLGTAGFCRLWIPGFAEMAAPLYPLTKTGTLFNWGPDQQKAYQEIKQALLTAPALGLPDLTKPFELFVDEKQGYAKGVLTQKLGPWRRPVAYLSKKLDPVAAGWPPCLRMVAAIAVLTKDAGKLTMGQPLVILAPHAVEALVKQPPDRWLSNARMTHYQAMLLDTDRVQFGPVVALNPATLLPLPEKEAPHDCLEILAETHGTRPDLTDQPIPDADYTWYTDGSSFLQEGQRRAGAAVTTETEVIWARALPAGTSAQRAELIALTQALKMAEGKKLNVYTDSRYAFATAHVHGEIYRRRGLLTSEGREIKNKNEILALLKALFLPKRLSIIHCPGHQKGNSAEARGNRMADQAAREAAMKAVLETSTLLAGKRTADGSEFEKRTADGSEFESPKKKAKVE

SEQ ID NO: 7252 - protein, 2096 aa, synthetic construct
MPAAKRVKLDGGDKKYSIGLDIGTNSVGWAVITDEYKVPSKKFKVLGNTDRHSIKKNLIGALLFDSGETAEATRLKRTARRRYTRRKNRICYLQEIFSNEMAKVDDSFFHRLEESFLVEEDKKHERHPIFGNIVDEVAYHEKYPTIYHLRKKLVDSTDKADLRLIYLALAHMIKFRGHFLIEGDLNPDNSDVDKLFIQLVQTYNQLFEENPINASGVDAKAILSARLSKSRRLENLIAQLPGEKKNGLFGNLIALSLGLTPNFKSNFDLAEDAKLQLSKDTYDDDLDNLLAQIGDQYADLFLAAKNLSDAILLSDILRVNTEITKAPLSASMIKRYDEHHQDLTLLKALVRQQLPEKYKEIFFDQSKNGYAGYIDGGASQEEFYKFIKPILEKMDGTEELLVKLNREDLLRKQRTFDNGSIPHQIHLGELHAILRRQEDFYPFLKDNREKIEKILTFRIPYYVGPLARGNSRFAWMTRKSEETITPWNFEEVVDKGASAQSFIERMTNFDKNLPNEKVLPKHSLLYEYFTVYNELTKVKYVTEGMRKPAFLSGEQKKAIVDLLFKTNRKVTVKQLKEDYFKKIECFDSVEISGVEDRFNASLGTYHDLLKIIKDKDFLDNEENEDILEDIVLTLTLFEDREMIEERLKTYAHLFDDKVMKQLKRRRYTGWGRLSRKLINGIRDKQSGKTILDFLKSDGFANRNFMQLIHDDSLTFKEDIQKAQVSGQGDSLHEHIANLAGSPAIKKGILQTVKVVDELVKVMGRHKPENIVIEMARENQTTQKGQKNSRERMKRIEEGIKELGSQILKEHPVENTQLQNEKLYLYYLQNGRDMYVDQELDINRLSDYDVDHIVPQSFLKDDSIDNKVLTRSDKARGKSDNVPSEEVVKKMKNYWRQLLNAKLITQRKFDNLTKAERGGLSELDKAGFIKRQLVETRQITKHVAQILDSRMNTKYDENDKLIREVKVITLKSKLVSDFRKDFQFYKVREINNYHHAHDAYLNAVVGTALIKKYPKLESEFVYGDYKVYDVRKMIAKSEQEIGKATAKYFFYSNIMNFFKTEITLANGEIRKRPLIETNGETGEIVWDKGRDFATVRKVLSMPQVNIVKKTEVQTGGFSKESILPKRNSDKLIARKKDWDPKKYGGFDSPTVAYSVLVVAKVEKGKSKKLKSVKELLGITIMERSSFEKNPIDFLEAKGYKEVKKDLIIKLPKYSLFELENGRKRMLASAGELQKGNELALPSKYVNFLYLASHYEKLKGSPEDNEQKQLFVEQHKHYLDEIIEQISEFSKRVILADANLDKVLSAYNKHRDKPIREQAENIIHLFTLTNLGAPAAFKYFDTTIDRKRYTSTKEVLDATLIHQSITGLYETRIDLSQLGGDGGPAPGGSEAAAKGGTLNIEDEYRLHETSKEPDVPLGSTWLSDFPQAWAETGGMGLAVRQAPLIIPLKATSTPVSIKQYPMSQEARLGIKPHIQRLLDQGILVPCQSPWNTPLLPVKKPGTNDYRPVQDLREVNKRVEDIHPTVPNPYNLLSGLPPSHQWYTVLDLKDAFFCLRLHPTSQPLFAFEWRDPEMGISGQLTWTRLPQGFKNSPTLFNEALHRDLADFRIQHPDLILLQYVDDLLLAATSEQDCQRGTRALLQTLGNLGYRASAKKAQICQKQVKYLGYLLKEGQRWLTEARKETVMGQPTPKTPRQLREFLGTAGFCRLWIPGFAEMAAPLYPLTKPGTLFNWGPDQQKAYQEIKQALLTAPALGLPDLTKPFELFVDEKQGYAKGVLTQKLGPWRRPVAYLSKKLDPVAAGWPPCLRMVAAIAVLTKDAGKLTMGQPLVILAPHAVEALVKQPPDRWLSNARMTHYQAMLLDTDRVQFGPVVALNPATLLPLPEKEAPHDCLEILAETHGTRPDLTDQPIPDADYTWYTDGSSFLQEGQRRAGAAVTTETEVIWARALPAGTSAQRAELIALTQALKMAEGKKLNVYTDSRYAFATAHVHGEIYRRRGWLTSEGREIKNKNEILALLKALFLPKRLSIIHCPGHQKGNSAEARGNRMADQAAREAAMKAVLETSTLLAGKRTADGSEFEKRTADGSEFESPKKKAKVE

SEQ ID NO: 7253 - protein, 2098 aa, synthetic construct
MPAAKRVKLDGGDKKYSIGLDIGTNSVGWAVITDEYKVPSKKFKVLGNTDRHSIKKNLIGALLFDSGETAEATRLKRTARRRYTRRKNRICYLQEIFSNEMAKVDDSFFHRLEESFLVEEDKKHERHPIFGNIVDEVAYHEKYPTIYHLRKKLVDSTDKADLRLIYLALAHMIKFRGHFLIEGDLNPDNSDVDKLFIQLVQTYNQLFEENPINASGVDAKAILSARLSKSRRLENLIAQLPGEKKNGLFGNLIALSLGLTPNFKSNFDLAEDAKLQLSKDTYDDDLDNLLAQIGDQYADLFLAAKNLSDAILLSDILRVNTEITKAPLSASMIKRYDEHHQDLTLLKALVRQQLPEKYKEIFFDQSKNGYAGYIDGGASQEEFYKFIKPILEKMDGTEELLVKLNREDLLRKQRTFDNGSIPHQIHLGELHAILRRQEDFYPFLKDNREKIEKILTFRIPYYVGPLARGNSRFAWMTRKSEETITPWNFEEVVDKGASAQSFIERMTNFDKNLPNEKVLPKHSLLYEYFTVYNELTKVKYVTEGMRKPAFLSGEQKKAIVDLLFKTNRKVTVKQLKEDYFKKIECFDSVEISGVEDRFNASLGTYHDLLKIIKDKDFLDNEENEDILEDIVLTLTLFEDREMIEERLKTYAHLFDDKVMKQLKRRRYTGWGRLSRKLINGIRDKQSGKTILDFLKSDGFANRNFMQLIHDDSLTFKEDIQKAQVSGQGDSLHEHIANLAGSPAIKKGILQTVKVVDELVKVMGRHKPENIVIEMARENQTTQKGQKNSRERMKRIEEGIKELGSQILKEHPVENTQLQNEKLYLYYLQNGRDMYVDQELDINRLSDYDVDHIVPQSFLKDDSIDNKVLTRSDKARGKSDNVPSEEVVKKMKNYWRQLLNAKLITQRKFDNLTKAERGGLSELDKAGFIKRQLVETRQITKHVAQILDSRMNTKYDENDKLIREVKVITLKSKLVSDFRKDFQFYKVREINNYHHAHDAYLNAVVGTALIKKYPKLESEFVYGDYKVYDVRKMIAKSEQEIGKATAKYFFYSNIMNFFKTEITLANGEIRKRPLIETNGETGEIVWDKGRDFATVRKVLSMPQVNIVKKTEVQTGGFSKESILPKRNSDKLIARKKDWDPKKYGGFDSPTVAYSVLVVAKVEKGKSKKLKSVKELLGITIMERSSFEKNPIDFLEAKGYKEVKKDLIIKLPKYSLFELENGRKRMLASAGELQKGNELALPSKYVNFLYLASHYEKLKGSPEDNEQKQLFVEQHKHYLDEIIEQISEFSKRVILADANLDKVLSAYNKHRDKPIREQAENIIHLFTLTNLGAPAAFKYFDTTIDRKRYTSTKEVLDATLIHQSITGLYETRIDLSQLGGDGGPAPEAAAKGGSGGTAPLEEEYRLFLEAPIQNVTLLEQWKREIPKVWAEINPPGLASTQAPIHVQLLSTALPVRVRQYPITLEAKRSLRETIRKFRAAGILRPVHSPWNTPLLPVRKSGTSEYRMVQDLREVNKRVETIHPTVPNPYTLLSLLPPDRIWYSVLDLKDAFFCIPLAPESQLIFAFEWADAEEGESGQLTWTRLPQGFKNSPTLFDEALNRDLQGFRLDHPSVSLLQYVDDLLIAADTQAACLSATRDLLMTLAELGYRVSGKKAQLCQEEVTYLGFKIHKGSRSLSNSRTQAILQIPVPKTKRQVREFLGTIGYCRLWIPGFAELAQPLYAATRGGNDPLVWGEKEEEAFQSLKLALTQPPALALPSLDKPFQLFVEETSGAAKGVLTQALGPWKRPVAYLSKRLDPVAAGWPRCLRAIAAAALLTREASKLTFGQDIEITSSHNLESLLRSPPDKWLTNARITQYQVLLLDPPRVRFKQTAALNPATLLPETDDTLPIHHCLDTLDSLTSTRPDLTDQPLAQAEATLFTDGSSYIRDGKRYAGAAVVTLDSVIWAEPLPIGTSAQKAELIALTKALEWSKDKSVNIYTDSRYAFATLHVHGMIYRERGLLTAGGKAIKNAPEILALLTAVWLPKRVAVMHCKGHQKDDAPTSTGNRRADEVAREVAIRPLSTQATISAGKRTADGSEFEKRTADGSEFESPKKKAKVE

SEQ ID NO: 7254 - protein, 2173 aa, synthetic construct
MPAAKRVKLDGGDKKYSIGLDIGTNSVGWAVITDEYKVPSKKFKVLGNTDRHSIKKNLIGALLFDSGETAEATRLKRTARRRYTRRKNRICYLQEIFSNEMAKVDDSFFHRLEESFLVEEDKKHERHPIFGNIVDEVAYHEKYPTIYHLRKKLVDSTDKADLRLIYLALAHMIKFRGHFLIEGDLNPDNSDVDKLFIQLVQTYNQLFEENPINASGVDAKAILSARLSKSRRLENLIAQLPGEKKNGLFGNLIALSLGLTPNFKSNFDLAEDAKLQLSKDTYDDDLDNLLAQIGDQYADLFLAAKNLSDAILLSDILRVNTEITKAPLSASMIKRYDEHHQDLTLLKALVRQQLPEKYKEIFFDQSKNGYAGYIDGGASQEEFYKFIKPILEKMDGTEELLVKLNREDLLRKQRTFDNGSIPHQIHLGELHAILRRQEDFYPFLKDNREKIEKILTFRIPYYVGPLARGNSRFAWMTRKSEETITPWNFEEVVDKGASAQSFIERMTNFDKNLPNEKVLPKHSLLYEYFTVYNELTKVKYVTEGMRKPAFLSGEQKKAIVDLLFKTNRKVTVKQLKEDYFKKIECFDSVEISGVEDRFNASLGTYHDLLKIIKDKDFLDNEENEDILEDIVLTLTLFEDREMIEERLKTYAHLFDDKVMKQLKRRRYTGWGRLSRKLINGIRDKQSGKTILDFLKSDGFANRNFMQLIHDDSLTFKEDIQKAQVSGQGDSLHEHIANLAGSPAIKKGILQTVKVVDELVKVMGRHKPENIVIEMARENQTTQKGQKNSRERMKRIEEGIKELGSQILKEHPVENTQLQNEKLYLYYLQNGRDMYVDQELDINRLSDYDVDHIVPQSFLKDDSIDNKVLTRSDKARGKSDNVPSEEVVKKMKNYWRQLLNAKLITQRKFDNLTKAERGGLSELDKAGFIKRQLVETRQITKHVAQILDSRMNTKYDENDKLIREVKVITLKSKLVSDFRKDFQFYKVREINNYHHAHDAYLNAVVGTALIKKYPKLESEFVYGDYKVYDVRKMIAKSEQEIGKATAKYFFYSNIMNFFKTEITLANGEIRKRPLIETNGETGEIVWDKGRDFATVRKVLSMPQVNIVKKTEVQTGGFSKESILPKRNSDKLIARKKDWDPKKYGGFDSPTVAYSVLVVAKVEKGKSKKLKSVKELLGITIMERSSFEKNPIDFLEAKGYKEVKKDLIIKLPKYSLFELENGRKRMLASAGELQKGNELALPSKYVNFLYLASHYEKLKGSPEDNEQKQLFVEQHKHYLDEIIEQISEFSKRVILADANLDKVLSAYNKHRDKPIREQAENIIHLFTLTNLGAPAAFKYFDTTIDRKRYTSTKEVLDATLIHQSITGLYETRIDLSQLGGDGGPAPEAAAKGGSGGMDLLKPLTVERKGVKIKGYWNSQADITCVPKDLLQGEEPVRQQNVTTIHGTQEGDVYYVNLKIDGRRINTEVIGTTLDYAIITPGDVPWILKKPLELTIKLDLEEQQGTLLNNSILSKKGKEELKQLFEKYSALWQSWENQVGHRRIRPHKIATGTVKPTPQKQYHINPKAKPDIQIVINDLLKQGVLIQKESTMNTPVYPVPKPNGRWRMVLDYRAVNKVTPLIAVQNQHSYGILGSLFKGRYKTTIDLSNGFWAHPIVPEDYWITAFTWQGKQYCWTVLPQGFLNSPGLFTGDVVDLLQGIPNVEVYVDDVYISHDSEKEHLEYLDILFNRLKEAGYIISLKKSNIANSIVDFLGFQITNEGRGLTDTFKEKLENITAPTTLKQLQSILGLLNFARNFIPDFTELIAPLYALIPKSTKNYVPWQIEHSTTLETLITKLNGAEYLQGRKGDKTLIMKVNASYTTGYIRYYNEGEKKPISYVSIVFSKTELKFTELEKLLTTVHKGLLKALDLSMGQNIHVYSPIVSMQNIQKTPQTAKKALASRWLSWLSYLEDPRIRFFYDPQMPALKDLPAVDTGKDNKKHPSNFQHIFYTDGSAITSPTKEGHLNAGMGIVYFINKDGNLQKQQEWSISLGNHTAQFAEIAAFEFALKKCLPLGGNILVVTDSNYVAKAYNEELDVWASNGFVNNRKKPLKHISKWKSVADLKRLRPDVVVTHEPGHQKLDSSPHAYGNNLADQLATQASFKVHAGKRTADGSEFEKRTADGSEFESPKKKAKVE

SEQ ID NO: 7255 - protein, 2087 aa, synthetic construct
MPAAKRVKLDGGDKKYSIGLDIGTNSVGWAVITDEYKVPSKKFKVLGNTDRHSIKKNLIGALLFDSGETAEATRLKRTARRRYTRRKNRICYLQEIFSNEMAKVDDSFFHRLEESFLVEEDKKHERHPIFGNIVDEVAYHEKYPTIYHLRKKLVDSTDKADLRLIYLALAHMIKFRGHFLIEGDLNPDNSDVDKLFIQLVQTYNQLFEENPINASGVDAKAILSARLSKSRRLENLIAQLPGEKKNGLFGNLIALSLGLTPNFKSNFDLAEDAKLQLSKDTYDDDLDNLLAQIGDQYADLFLAAKNLSDAILLSDILRVNTEITKAPLSASMIKRYDEHHQDLTLLKALVRQQLPEKYKEIFFDQSKNGYAGYIDGGASQEEFYKFIKPILEKMDGTEELLVKLNREDLLRKQRTFDNGSIPHQIHLGELHAILRRQEDFYPFLKDNREKIEKILTFRIPYYVGPLARGNSRFAWMTRKSEETITPWNFEEVVDKGASAQSFIERMTNFDKNLPNEKVLPKHSLLYEYFTVYNELTKVKYVTEGMRKPAFLSGEQKKAIVDLLFKTNRKVTVKQLKEDYFKKIECFDSVEISGVEDRFNASLGTYHDLLKIIKDKDFLDNEENEDILEDIVLTLTLFEDREMIEERLKTYAHLFDDKVMKQLKRRRYTGWGRLSRKLINGIRDKQSGKTILDFLKSDGFANRNFMQLIHDDSLTFKEDIQKAQVSGQGDSLHEHIANLAGSPAIKKGILQTVKVVDELVKVMGRHKPENIVIEMARENQTTQKGQKNSRERMKRIEEGIKELGSQILKEHPVENTQLQNEKLYLYYLQNGRDMYVDQELDINRLSDYDVDHIVPQSFLKDDSIDNKVLTRSDKARGKSDNVPSEEVVKKMKNYWRQLLNAKLITQRKFDNLTKAERGGLSELDKAGFIKRQLVETRQITKHVAQILDSRMNTKYDENDKLIREVKVITLKSKLVSDFRKDFQFYKVREINNYHHAHDAYLNAVVGTALIKKYPKLESEFVYGDYKVYDVRKMIAKSEQEIGKATAKYFFYSNIMNFFKTEITLANGEIRKRPLIETNGETGEIVWDKGRDFATVRKVLSMPQVNIVKKTEVQTGGFSKESILPKRNSDKLIARKKDWDPKKYGGFDSPTVAYSVLVVAKVEKGKSKKLKSVKELLGITIMERSSFEKNPIDFLEAKGYKEVKKDLIIKLPKYSLFELENGRKRMLASAGELQKGNELALPSKYVNFLYLASHYEKLKGSPEDNEQKQLFVEQHKHYLDEIIEQISEFSKRVILADANLDKVLSAYNKHRDKPIREQAENIIHLFTLTNLGAPAAFKYFDTTIDRKRYTSTKEVLDATLIHQSITGLYETRIDLSQLGGDGGPAPEAAAKGGSGGVPWILKKPLELTIKLDLEEQQGTLLNNSILSKKGKEELKQLFEKYSALWQSWENQVGHRRIRPHKIATGTVKPTPQKQYHINPKAKPDIQIVINDLLKQGVLIQKESTMNTPVYPVPKPNGRWRMVLDYRAVNKVTPLIAVQNQHSYGILGSLFKGRYKTTIDLSNGFWAHPIVPEDYWITAFTWQGKQYCWTVLPQGFLNSPGLFTGDVVDLLQGIPNVEVYVDDVYISHDSEKEHLEYLDILFNRLKEAGYIISLKKSNIANSIVDFLGFQITNEGRGLTDTFKEKLENITAPTTLKQLQSILGLLNFARNFIPDFTELIAPLYALIPKSTKNYVPWQIEHSTTLETLITKLNGAEYLQGRKGDKTLIMKVNASYTTGYIRYYNEGEKKPISYVSIVFSKTELKFTELEKLLTTVHKGLLKALDLSMGQNIHVYSPIVSMQNIQKTPQTAKKALASRWLSWLSYLEDPRIRFFYDPQMPALKDLPAVDTGKDNKKHPSNFQHIFYTDGSAITSPTKEGHLNAGMGIVYFINKDGNLQKQQEWSISLGNHTAQFAEIAAFEFALKKCLPLGGNILVVTDSNYVAKAYNEELDVWASNGFVNNRKKPLKHISKWKSVADLKRLRPDVVVTHEPGHQKLDSSPHAYGNNLADQLATQASFKVHAGKRTADGSEFEKRTADGSEFESPKKKAKVE

SEQ ID NO: 7256 - protein, 2095 aa, synthetic construct
MPAAKRVKLDGGDKKYSIGLDIGTNSVGWAVITDEYKVPSKKFKVLGNTDRHSIKKNLIGALLFDSGETAEATRLKRTARRRYTRRKNRICYLQEIFSNEMAKVDDSFFHRLEESFLVEEDKKHERHPIFGNIVDEVAYHEKYPTIYHLRKKLVDSTDKADLRLIYLALAHMIKFRGHFLIEGDLNPDNSDVDKLFIQLVQTYNQLFEENPINASGVDAKAILSARLSKSRRLENLIAQLPGEKKNGLFGNLIALSLGLTPNFKSNFDLAEDAKLQLSKDTYDDDLDNLLAQIGDQYADLFLAAKNLSDAILLSDILRVNTEITKAPLSASMIKRYDEHHQDLTLLKALVRQQLPEKYKEIFFDQSKNGYAGYIDGGASQEEFYKFIKPILEKMDGTEELLVKLNREDLLRKQRTFDNGSIPHQIHLGELHAILRRQEDFYPFLKDNREKIEKILTFRIPYYVGPLARGNSRFAWMTRKSEETITPWNFEEVVDKGASAQSFIERMTNFDKNLPNEKVLPKHSLLYEYFTVYNELTKVKYVTEGMRKPAFLSGEQKKAIVDLLFKTNRKVTVKQLKEDYFKKIECFDSVEISGVEDRFNASLGTYHDLLKIIKDKDFLDNEENEDILEDIVLTLTLFEDREMIEERLKTYAHLFDDKVMKQLKRRRYTGWGRLSRKLINGIRDKQSGKTILDFLKSDGFANRNFMQLIHDDSLTFKEDIQKAQVSGQGDSLHEHIANLAGSPAIKKGILQTVKVVDELVKVMGRHKPENIVIEMARENQTTQKGQKNSRERMKRIEEGIKELGSQILKEHPVENTQLQNEKLYLYYLQNGRDMYVDQELDINRLSDYDVDHIVPQSFLKDDSIDNKVLTRSDKARGKSDNVPSEEVVKKMKNYWRQLLNAKLITQRKFDNLTKAERGGLSELDKAGFIKRQLVETRQITKHVAQILDSRMNTKYDENDKLIREVKVITLKSKLVSDFRKDFQFYKVREINNYHHAHDAYLNAVVGTALIKKYPKLESEFVYGDYKVYDVRKMIAKSEQEIGKATAKYFFYSNIMNFFKTEITLANGEIRKRPLIETNGETGEIVWDKGRDFATVRKVLSMPQVNIVKKTEVQTGGFSKESILPKRNSDKLIARKKDWDPKKYGGFDSPTVAYSVLVVAKVEKGKSKKLKSVKELLGITIMERSSFEKNPIDFLEAKGYKEVKKDLIIKLPKYSLFELENGRKRMLASAGELQKGNELALPSKYVNFLYLASHYEKLKGSPEDNEQKQLFVEQHKHYLDEIIEQISEFSKRVILADANLDKVLSAYNKHRDKPIREQAENIIHLFTLTNLGAPAAFKYFDTTIDRKRYTSTKEVLDATLIHQSITGLYETRIDLSQLGGDGGPAPEAAAKGGSGGTLQLEEEYRLFEPESTQKQEMDIWLKNFPQAWAETGGMGTAHCQAPVLIQLKATATPISIRQYPMPHEAYQGIKPHIRRMLDQGILKPCQSPWNTPLLPVKKPGTEDYRPVQDLREVNKRVEDIHPTVPNPYNLLSTLPPSHPWYTVLDLKDAFFCLRLHSESQLLFAFEWRDPEIGLSGQLTWTRLPQGFKNSPTLFNEALHSDLADFRVRYPALVLLQYVDDLLLAAATRTECLEGTKALLETLGNKGYRASAKKAQICLQEVTYLGYSLKDGQRWLTKARKEAILSIPVPKNSRQVREFLGTAGYCRLWIPGFAELAAPLYPLTRPGTLFQWGTEQQLAFEDIKKALLSSPALGLPDITKPFELFIDENSGFAKGVLVQKLGPWKRPVAYLSKKLDTVASGWPPCLRMVAAIAILVKDAGKLTLGQPLTILTSHPVEALVRQPPNKWLSNARMTHYQAMLLDAERVHFGPTVSLNPATLLPLPSGGNHHDCLQILAETHGTRPDLTDQPLPDADLTWYTDGSSFIRNGEREAGAAVTTESEVIWAAPLPPGTSAQRAELIALTQALKMAEGKKLTVYTDSRYAFATTHVHGEIYRRRGWLTSEGKEIKNKNEILALLEALFLPKRLSIIHCPGHQKGDSPQAKGNRLADDTAKKAATETHSSLTVLPAGKRTADGSEFEKRTADGSEFESPKKKAKVE

SEQ ID NO: 7257 - protein, 2094 aa, synthetic construct
MPAAKRVKLDGGDKKYSIGLDIGTNSVGWAVITDEYKVPSKKFKVLGNTDRHSIKKNLIGALLFDSGETAEATRLKRTARRRYTRRKNRICYLQEIFSNEMAKVDDSFFHRLEESFLVEEDKKHERHPIFGNIVDEVAYHEKYPTIYHLRKKLVDSTDKADLRLIYLALAHMIKFRGHFLIEGDLNPDNSDVDKLFIQLVQTYNQLFEENPINASGVDAKAILSARLSKSRRLENLIAQLPGEKKNGLFGNLIALSLGLTPNFKSNFDLAEDAKLQLSKDTYDDDLDNLLAQIGDQYADLFLAAKNLSDAILLSDILRVNTEITKAPLSASMIKRYDEHHQDLTLLKALVRQQLPEKYKEIFFDQSKNGYAGYIDGGASQEEFYKFIKPILEKMDGTEELLVKLNREDLLRKQRTFDNGSIPHQIHLGELHAILRRQEDFYPFLKDNREKIEKILTFRIPYYVGPLARGNSRFAWMTRKSEETITPWNFEEVVDKGASAQSFIERMTNFDKNLPNEKVLPKHSLLYEYFTVYNELTKVKYVTEGMRKPAFLSGEQKKAIVDLLFKTNRKVTVKQLKEDYFKKIECFDSVEISGVEDRFNASLGTYHDLLKIIKDKDFLDNEENEDILEDIVLTLTLFEDREMIEERLKTYAHLFDDKVMKQLKRRRYTGWGRLSRKLINGIRDKQSGKTILDFLKSDGFANRNFMQLIHDDSLTFKEDIQKAQVSGQGDSLHEHIANLAGSPAIKKGILQTVKVVDELVKVMGRHKPENIVIEMARENQTTQKGQKNSRERMKRIEEGIKELGSQILKEHPVENTQLQNEKLYLYYLQNGRDMYVDQELDINRLSDYDVDHIVPQSFLKDDSIDNKVLTRSDKARGKSDNVPSEEVVKKMKNYWRQLLNAKLITQRKFDNLTKAERGGLSELDKAGFIKRQLVETRQITKHVAQILDSRMNTKYDENDKLIREVKVITLKSKLVSDFRKDFQFYKVREINNYHHAHDAYLNAVVGTALIKKYPKLESEFVYGDYKVYDVRKMIAKSEQEIGKATAKYFFYSNIMNFFKTEITLANGEIRKRPLIETNGETGEIVWDKGRDFATVRKVLSMPQVNIVKKTEVQTGGFSKESILPKRNSDKLIARKKDWDPKKYGGFDSPTVAYSVLVVAKVEKGKSKKLKSVKELLGITIMERSSFEKNPIDFLEAKGYKEVKKDLIIKLPKYSLFELENGRKRMLASAGELQKGNELALPSKYVNFLYLASHYEKLKGSPEDNEQKQLFVEQHKHYLDEIIEQISEFSKRVILADANLDKVLSAYNKHRDKPIREQAENIIHLFTLTNLGAPAAFKYFDTTIDRKRYTSTKEVLDATLIHQSITGLYETRIDLSQLGGDGGPAPEAAAKGGSGGVLNLEEEYRLHEKPVPSSIDPSWLQLFPTVWAERAGMGLANQVPPVVVELRSGASPVAVRQYPMSKEAREGIRPHIQKFLDLGVLVPCRSPWNTPLLPVKKPGTNDYRPVQDLREINKRVQDIHPTVPNPYNLLSSLPPSYTWYSVLDLKDAFFCLRLHPNSQPLFAFEWKDPEKGNTGQLTWTRLPQGFKNSPTLFNEALHRDLAPFRALNPQVVLLQYVDDLLVAAPTYEDCKKGTQKLLQELSKLGYRVSAKKAQLCQREVTYLGYLLKEGKRWLTPARKATVMKIPVPTTPRQVREFLGKAGFCRLFIPGFASLAAPLYPLTKPSIPFIWTEEHQQAFDHIKKALLSAPALALPDLTKPFTLYIDERAGVARGVLTQTLGPWRRPVAYLSKKLDPVASGWPTCLKAVAAVALLLKDADKLTLGQNVTVIASHSLESIVRQPPDRWMTNARMTHYQSLLLNERVSFAPPAVLNPATLLPVESEATPVHRCSEILAEETGTRRDLEDQPLPGVPTWYTDGSSFITEGKRRAGAPIVDGKRTVWASSLPEGTSAQKAELVALTQALRLAEGKNINIYTDSRYAFATAHIHGAIYKQRGWLTSAGKDIKNKEEILALLEAIHLPRRVAIIHCPGHQRGSNPVATGNRRADEAAKQAALSTRVLAGTTKPAGKRTADGSEFEKRTADGSEFESPKKKAKVE

SEQ ID NO: 7258 - protein, 2127 aa, synthetic construct
MPAAKRVKLDGGDKKYSIGLDIGTNSVGWAVITDEYKVPSKKFKVLGNTDRHSIKKNLIGALLFDSGETAEATRLKRTARRRYTRRKNRICYLQEIFSNEMAKVDDSFFHRLEESFLVEEDKKHERHPIFGNIVDEVAYHEKYPTIYHLRKKLVDSTDKADLRLIYLALAHMIKFRGHFLIEGDLNPDNSDVDKLFIQLVQTYNQLFEENPINASGVDAKAILSARLSKSRRLENLIAQLPGEKKNGLFGNLIALSLGLTPNFKSNFDLAEDAKLQLSKDTYDDDLDNLLAQIGDQYADLFLAAKNLSDAILLSDILRVNTEITKAPLSASMIKRYDEHHQDLTLLKALVRQQLPEKYKEIFFDQSKNGYAGYIDGGASQEEFYKFIKPILEKMDGTEELLVKLNREDLLRKQRTFDNGSIPHQIHLGELHAILRRQEDFYPFLKDNREKIEKILTFRIPYYVGPLARGNSRFAWMTRKSEETITPWNFEEVVDKGASAQSFIERMTNFDKNLPNEKVLPKHSLLYEYFTVYNELTKVKYVTEGMRKPAFLSGEQKKAIVDLLFKTNRKVTVKQLKEDYFKKIECFDSVEISGVEDRFNASLGTYHDLLKIIKDKDFLDNEENEDILEDIVLTLTLFEDREMIEERLKTYAHLFDDKVMKQLKRRRYTGWGRLSRKLINGIRDKQSGKTILDFLKSDGFANRNFMQLIHDDSLTFKEDIQKAQVSGQGDSLHEHIANLAGSPAIKKGILQTVKVVDELVKVMGRHKPENIVIEMARENQTTQKGQKNSRERMKRIEEGIKELGSQILKEHPVENTQLQNEKLYLYYLQNGRDMYVDQELDINRLSDYDVDHIVPQSFLKDDSIDNKVLTRSDKARGKSDNVPSEEVVKKMKNYWRQLLNAKLITQRKFDNLTKAERGGLSELDKAGFIKRQLVETRQITKHVAQILDSRMNTKYDENDKLIREVKVITLKSKLVSDFRKDFQFYKVREINNYHHAHDAYLNAVVGTALIKKYPKLESEFVYGDYKVYDVRKMIAKSEQEIGKATAKYFFYSNIMNFFKTEITLANGEIRKRPLIETNGETGEIVWDKGRDFATVRKVLSMPQVNIVKKTEVQTGGFSKESILPKRNSDKLIARKKDWDPKKYGGFDSPTVAYSVLVVAKVEKGKSKKLKSVKELLGITIMERSSFEKNPIDFLEAKGYKEVKKDLIIKLPKYSLFELENGRKRMLASAGELQKGNELALPSKYVNFLYLASHYEKLKGSPEDNEQKQLFVEQHKHYLDEIIEQISEFSKRVILADANLDKVLSAYNKHRDKPIREQAENIIHLFTLTNLGAPAAFKYFDTTIDRKRYTSTKEVLDATLIHQSITGLYETRIDLSQLGGDGGPAPEAAAKGGSGGLLGRDLLTKLKAQIQFSTEGPQVTWEDRPAMCLVLNLEEEYRLHEKPVPPSIDPSWLQLFPMVWAEKAGMGLANQVPPVVVELKSDASPVAVRQYPMSKEAREGIRPHIQRFLDLGILVPCQSPWNTPLLPVKKPGTNDYRPVQDLREVNKRVQDIHPTVPNPYNLLSSLPPSHTWYSVLDLKDAFFCLKLHPNSQPLFAFEWRDPEKGNTGQLTWTRLPQGFKNSPTLFNEALHRDLASFRALNPQVVMLQYVDDLLVAAPTYRDCKEGTRRLLQELSKLGYRVSAKKAQLCREEVTYLGYLLKGGKRWLTPARKATVMKIPTPTTPRQVREFLGKAGFCRLFIPGFASLAAPLYPLTRPKVPFTWTEAHQEAFGRIKEALLSAPALALPDLTKPFALYVDEKEGVARGVLTQTLGPWRRPVAYLSKKLDPVASGWPTCLKAIAAVALLLKDADKLTLGQNVLVIAPHNLESIVRQPPDRWMTNARMTHYQSLLLNERVSFAPPAILNPATLLPVESDDTPIHICSEILAEETGTRPDLRDQPLPGVPAWYTDGSSFIMDGRRQAGAAIVDNKRTVWASNLPEGTSAQKAELIALTQALRLAEGKSINIYTDSRYAFATAHVHGAIYKQRGWLTSAGKDIKNKEEILALLEAIHLPKRVAIIHCPGHQRGTDPVATGNRKADEAAKQAAQSTRILTETTKNAGKRTADGSEFEKRTADGSEFESPKKKAKVE

SEQ ID NO: 7259 - protein, 2218 aa, synthetic construct
MPAAKRVKLDGGDKKYSIGLDIGTNSVGWAVITDEYKVPSKKFKVLGNTDRHSIKKNLIGALLFDSGETAEATRLKRTARRRYTRRKNRICYLQEIFSNEMAKVDDSFFHRLEESFLVEEDKKHERHPIFGNIVDEVAYHEKYPTIYHLRKKLVDSTDKADLRLIYLALAHMIKFRGHFLIEGDLNPDNSDVDKLFIQLVQTYNQLFEENPINASGVDAKAILSARLSKSRRLENLIAQLPGEKKNGLFGNLIALSLGLTPNFKSNFDLAEDAKLQLSKDTYDDDLDNLLAQIGDQYADLFLAAKNLSDAILLSDILRVNTEITKAPLSASMIKRYDEHHQDLTLLKALVRQQLPEKYKEIFFDQSKNGYAGYIDGGASQEEFYKFIKPILEKMDGTEELLVKLNREDLLRKQRTFDNGSIPHQIHLGELHAILRRQEDFYPFLKDNREKIEKILTFRIPYYVGPLARGNSRFAWMTRKSEETITPWNFEEVVDKGASAQSFIERMTNFDKNLPNEKVLPKHSLLYEYFTVYNELTKVKYVTEGMRKPAFLSGEQKKAIVDLLFKTNRKVTVKQLKEDYFKKIECFDSVEISGVEDRFNASLGTYHDLLKIIKDKDFLDNEENEDILEDIVLTLTLFEDREMIEERLKTYAHLFDDKVMKQLKRRRYTGWGRLSRKLINGIRDKQSGKTILDFLKSDGFANRNFMQLIHDDSLTFKEDIQKAQVSGQGDSLHEHIANLAGSPAIKKGILQTVKVVDELVKVMGRHKPENIVIEMARENQTTQKGQKNSRERMKRIEEGIKELGSQILKEHPVENTQLQNEKLYLYYLQNGRDMYVDQELDINRLSDYDVDHIVPQSFLKDDSIDNKVLTRSDKARGKSDNVPSEEVVKKMKNYWRQLLNAKLITQRKFDNLTKAERGGLSELDKAGFIKRQLVETRQITKHVAQILDSRMNTKYDENDKLIREVKVITLKSKLVSDFRKDFQFYKVREINNYHHAHDAYLNAVVGTALIKKYPKLESEFVYGDYKVYDVRKMIAKSEQEIGKATAKYFFYSNIMNFFKTEITLANGEIRKRPLIETNGETGEIVWDKGRDFATVRKVLSMPQVNIVKKTEVQTGGFSKESILPKRNSDKLIARKKDWDPKKYGGFDSPTVAYSVLVVAKVEKGKSKKLKSVKELLGITIMERSSFEKNPIDFLEAKGYKEVKKDLIIKLPKYSLFELENGRKRMLASAGELQKGNELALPSKYVNFLYLASHYEKLKGSPEDNEQKQLFVEQHKHYLDEIIEQISEFSKRVILADANLDKVLSAYNKHRDKPIREQAENIIHLFTLTNLGAPAAFKYFDTTIDRKRYTSTKEVLDATLIHQSITGLYETRIDLSQLGGDGGPAPEAAAKGGSGGTLGDQGSRGSDPLPEPRVTLTVEGIPTEFLVNTGAEHSVLTKPMGKMGSKRTVVAGATGSKVYPWTTKRLLKIGQKQVTHSFLVIPECPAPLLGRDLLTKLKAQIQFSTEGPQVTWEDRPAMCLVLNLEEEYRLHEKPVPPSIDPSWLQLFPMVWAEKAGMGLANQVPPVVVELKSDASPVAVRQYPMSKEAREGIRPHIQRFLDLGILVPCQSPWNTPLLPVKKPGTNDYRPVQDLREVNKRVQDIHPTVPNPYNLLSSLPPSHTWYSVLDLKDAFFCLKLHPNSQPLFAFEWRDPEKGNTGQLTWTRLPQGFKNSPTLFNEALHRDLASFRALNPQVVMLQYVDDLLVAAPTYRDCKEGTRRLLQELSKLGYRVSAKKAQLCREEVTYLGYLLKGGKRWLTPARKATVMKIPTPTTPRQVREFLGTAGFCRLWIPGFASLAAPLYPLTRPKVPFTWTEAHQEAFGRIKEALLSAPALALPDLTKPFALYVDEKEGVARGVLTQTLGPWRRPVAYLSKKLDPVASGWPTCLKAIAAVALLLKDADKLTLGQNVLVIAPHNLESIVRQPPDRWMTNARMTHYQSLLLNERVSFAPPAILNPATLLPVESDDTPIHICSEILAEETGTRPDLRDQPLPGVPAWYTDGSSFIMDGRRQAGAAIVDNKRTVWASNLPEGTSAQKAELIALTQALRLAEGKSINIYTDSRYAFATAHVHGAIYKQRGWLTSAGKDIKNKEEILALLEAIHLPKRVAIIHCPGHQRGTDPVATGNRKADEAAKQAAQSTRILTETTKNAGKRTADGSEFEKRTADGSEFESPKKKAKVE

SEQ ID NO: 7260 - protein, 2218 aa, synthetic construct
MPAAKRVKLDGGDKKYSIGLDIGTNSVGWAVITDEYKVPSKKFKVLGNTDRHSIKKNLIGALLFDSGETAEATRLKRTARRRYTRRKNRICYLQEIFSNEMAKVDDSFFHRLEESFLVEEDKKHERHPIFGNIVDEVAYHEKYPTIYHLRKKLVDSTDKADLRLIYLALAHMIKFRGHFLIEGDLNPDNSDVDKLFIQLVQTYNQLFEENPINASGVDAKAILSARLSKSRRLENLIAQLPGEKKNGLFGNLIALSLGLTPNFKSNFDLAEDAKLQLSKDTYDDDLDNLLAQIGDQYADLFLAAKNLSDAILLSDILRVNTEITKAPLSASMIKRYDEHHQDLTLLKALVRQQLPEKYKEIFFDQSKNGYAGYIDGGASQEEFYKFIKPILEKMDGTEELLVKLNREDLLRKQRTFDNGSIPHQIHLGELHAILRRQEDFYPFLKDNREKIEKILTFRIPYYVGPLARGNSRFAWMTRKSEETITPWNFEEVVDKGASAQSFIERMTNFDKNLPNEKVLPKHSLLYEYFTVYNELTKVKYVTEGMRKPAFLSGEQKKAIVDLLFKTNRKVTVKQLKEDYFKKIECFDSVEISGVEDRFNASLGTYHDLLKIIKDKDFLDNEENEDILEDIVLTLTLFEDREMIEERLKTYAHLFDDKVMKQLKRRRYTGWGRLSRKLINGIRDKQSGKTILDFLKSDGFANRNFMQLIHDDSLTFKEDIQKAQVSGQGDSLHEHIANLAGSPAIKKGILQTVKVVDELVKVMGRHKPENIVIEMARENQTTQKGQKNSRERMKRIEEGIKELGSQILKEHPVENTQLQNEKLYLYYLQNGRDMYVDQELDINRLSDYDVDHIVPQSFLKDDSIDNKVLTRSDKARGKSDNVPSEEVVKKMKNYWRQLLNAKLITQRKFDNLTKAERGGLSELDKAGFIKRQLVETRQITKHVAQILDSRMNTKYDENDKLIREVKVITLKSKLVSDFRKDFQFYKVREINNYHHAHDAYLNAVVGTALIKKYPKLESEFVYGDYKVYDVRKMIAKSEQEIGKATAKYFFYSNIMNFFKTEITLANGEIRKRPLIETNGETGEIVWDKGRDFATVRKVLSMPQVNIVKKTEVQTGGFSKESILPKRNSDKLIARKKDWDPKKYGGFDSPTVAYSVLVVAKVEKGKSKKLKSVKELLGITIMERSSFEKNPIDFLEAKGYKEVKKDLIIKLPKYSLFELENGRKRMLASAGELQKGNELALPSKYVNFLYLASHYEKLKGSPEDNEQKQLFVEQHKHYLDEIIEQISEFSKRVILADANLDKVLSAYNKHRDKPIREQAENIIHLFTLTNLGAPAAFKYFDTTIDRKRYTSTKEVLDATLIHQSITGLYETRIDLSQLGGDGGPAPEAAAKGGSGGTLGDQGSRGSDPLPEPRVTLTVEGIPTEFLVNTGAEHSVLTKPMGKMGSKRTVVAGATGSKVYPWTTKRLLKIGQKQVTHSFLVIPECPAPLLGRDLLTKLKAQIQFSTEGPQVTWEDRPAMCLVLNLEEEYRLHEKPVPPSIDPSWLQLFPMVWAEKAGMGLANQVPPVVVELKSDASPVAVRQYPMSKEAREGIRPHIQRFLDLGILVPCQSPWNTPLLPVKKPGTNDYRPVQDLREVNKRVQDIHPTVPNPYNLLSSLPPSHTWYSVLDLKDAFFCLKLHPNSQPLFAFEWRDPEKGNTGQLTWTRLPQGFKNSPTLFNEALHRDLASFRALNPQVVMLQYVDDLLVAAPTYRDCKEGTRRLLQELSKLGYRVSAKKAQLCREEVTYLGYLLKGGKRWLTPARKATVMKIPTPTTPRQVREFLGKAGFCRLFIPGFASLAAPLYPLTRPKVPFTWTEAHQEAFGRIKEALLSAPALALPDLTKPFALYVDEKEGVARGVLTQTLGPWRRPVAYLSKKLDPVASGWPTCLKAIAAVALLLKDADKLTLGQNVLVIAPHNLESIVRQPPDRWMTNARMTHYQSLLLNERVSFAPPAILNPATLLPVESDDTPIHICSEILAEETGTRPDLRDQPLPGVPAWYTDGSSFIMDGRRQAGAAIVDNKRTVWASNLPEGTSAQKAELIALTQALRLAEGKSINIYTDSRYAFATAHVHGAIYKQRGWLTSAGKDIKNKEEILALLEAIHLPKRVAIIHCPGHQRGTDPVATGNRKADEAAKQAAQSTRILTETTKNAGKRTADGSEFEKRTADGSEFESPKKKAKVE

SEQ ID NO: 7261 - protein, 2096 aa, synthetic construct
MPAAKRVKLDGGDKKYSIGLDIGTNSVGWAVITDEYKVPSKKFKVLGNTDRHSIKKNLIGALLFDSGETAEATRLKRTARRRYTRRKNRICYLQEIFSNEMAKVDDSFFHRLEESFLVEEDKKHERHPIFGNIVDEVAYHEKYPTIYHLRKKLVDSTDKADLRLIYLALAHMIKFRGHFLIEGDLNPDNSDVDKLFIQLVQTYNQLFEENPINASGVDAKAILSARLSKSRRLENLIAQLPGEKKNGLFGNLIALSLGLTPNFKSNFDLAEDAKLQLSKDTYDDDLDNLLAQIGDQYADLFLAAKNLSDAILLSDILRVNTEITKAPLSASMIKRYDEHHQDLTLLKALVRQQLPEKYKEIFFDQSKNGYAGYIDGGASQEEFYKFIKPILEKMDGTEELLVKLNREDLLRKQRTFDNGSIPHQIHLGELHAILRRQEDFYPFLKDNREKIEKILTFRIPYYVGPLARGNSRFAWMTRKSEETITPWNFEEVVDKGASAQSFIERMTNFDKNLPNEKVLPKHSLLYEYFTVYNELTKVKYVTEGMRKPAFLSGEQKKAIVDLLFKTNRKVTVKQLKEDYFKKIECFDSVEISGVEDRFNASLGTYHDLLKIIKDKDFLDNEENEDILEDIVLTLTLFEDREMIEERLKTYAHLFDDKVMKQLKRRRYTGWGRLSRKLINGIRDKQSGKTILDFLKSDGFANRNFMQLIHDDSLTFKEDIQKAQVSGQGDSLHEHIANLAGSPAIKKGILQTVKVVDELVKVMGRHKPENIVIEMARENQTTQKGQKNSRERMKRIEEGIKELGSQILKEHPVENTQLQNEKLYLYYLQNGRDMYVDQELDINRLSDYDVDHIVPQSFLKDDSIDNKVLTRSDKARGKSDNVPSEEVVKKMKNYWRQLLNAKLITQRKFDNLTKAERGGLSELDKAGFIKRQLVETRQITKHVAQILDSRMNTKYDENDKLIREVKVITLKSKLVSDFRKDFQFYKVREINNYHHAHDAYLNAVVGTALIKKYPKLESEFVYGDYKVYDVRKMIAKSEQEIGKATAKYFFYSNIMNFFKTEITLANGEIRKRPLIETNGETGEIVWDKGRDFATVRKVLSMPQVNIVKKTEVQTGGFSKESILPKRNSDKLIARKKDWDPKKYGGFDSPTVAYSVLVVAKVEKGKSKKLKSVKELLGITIMERSSFEKNPIDFLEAKGYKEVKKDLIIKLPKYSLFELENGRKRMLASAGELQKGNELALPSKYVNFLYLASHYEKLKGSPEDNEQKQLFVEQHKHYLDEIIEQISEFSKRVILADANLDKVLSAYNKHRDKPIREQAENIIHLFTLTNLGAPAAFKYFDTTIDRKRYTSTKEVLDATLIHQSITGLYETRIDLSQLGGDGGPAPEAAAKGGSGGTLNLEDEYRLYETSAEPEVSPGSTWLSDFPQAWAETGGMGLAVRQAPLIIPLKATSTPVSIKQYPMSQEAKLGIKPHIQRLLDQGILVPCQSPWNTPLLPVKKPGTNDYRPVQDLREVNKRVEDIHPTVPNPYNLLSGLPPSHRWYTVLDLKDAFFCLRLHPTSQPLFAFEWRDPGMGISGQLTWTRLPQGFKNSPTLFNEALHRDLADFRIQHPDLILLQYVDDILLAATSELDCQQGTRALLLTLGNLGYRASAKKAQLCQKQVKYLGYLLKEGQRWLTEARKETVMGQPTPKTPRQLREFLGTAGFCRLWIPGFAEMAAPLYPLTKPGTLFNWGPDQQKAYQEIKQALLTAPALGLPDLTKPFELFVDEKQGYAKGVLTQKLGPWRRPVAYLSKKLDPVAAGWPPCLRMVAAIAVLRKDAGKLTMGQPLVILAPHAVEALVKQPPDRWLSNARMTHYQAMLLDTDRVQFGPVVALNPATLLPLPEEGAPHDCLEILAETHGTRPDLTDQPIPDADHTWYTDGSSFLQEGQRKAGAAVTTETEVIWARALPAGTSAQRAELIALTQALKMAEGKRLNVYTDSRYAFATAHIHGEIYRRRGWLTSEGREIKNKSEILALLKALFLPKRLSIIHCLGHQKGDSAEARGNRLADQAAREAAIKTPPDTSTLLAGKRTADGSEFEKRTADGSEFESPKKKAKVE

SEQ ID NO: 7262 - protein, 2096 aa, synthetic construct; identical to SEQ ID NO: 4528

SEQ ID NO: 7263 - protein, 2096 aa, synthetic construct
MPAAKRVKLDGGDKKYSIGLDIGTNSVGWAVITDEYKVPSKKFKVLGNTDRHSIKKNLIGALLFDSGETAEATRLKRTARRRYTRRKNRICYLQEIFSNEMAKVDDSFFHRLEESFLVEEDKKHERHPIFGNIVDEVAYHEKYPTIYHLRKKLVDSTDKADLRLIYLALAHMIKFRGHFLIEGDLNPDNSDVDKLFIQLVQTYNQLFEENPINASGVDAKAILSARLSKSRRLENLIAQLPGEKKNGLFGNLIALSLGLTPNFKSNFDLAEDAKLQLSKDTYDDDLDNLLAQIGDQYADLFLAAKNLSDAILLSDILRVNTEITKAPLSASMIKRYDEHHQDLTLLKALVRQQLPEKYKEIFFDQSKNGYAGYIDGGASQEEFYKFIKPILEKMDGTEELLVKLNREDLLRKQRTFDNGSIPHQIHLGELHAILRRQEDFYPFLKDNREKIEKILTFRIPYYVGPLARGNSRFAWMTRKSEETITPWNFEEVVDKGASAQSFIERMTNFDKNLPNEKVLPKHSLLYEYFTVYNELTKVKYVTEGMRKPAFLSGEQKKAIVDLLFKTNRKVTVKQLKEDYFKKIECFDSVEISGVEDRFNASLGTYHDLLKIIKDKDFLDNEENEDILEDIVLTLTLFEDREMIEERLKTYAHLFDDKVMKQLKRRRYTGWGRLSRKLINGIRDKQSGKTILDFLKSDGFANRNFMQLIHDDSLTFKEDIQKAQVSGQGDSLHEHIANLAGSPAIKKGILQTVKVVDELVKVMGRHKPENIVIEMARENQTTQKGQKNSRERMKRIEEGIKELGSQILKEHPVENTQLQNEKLYLYYLQNGRDMYVDQELDINRLSDYDVDHIVPQSFLKDDSIDNKVLTRSDKARGKSDNVPSEEVVKKMKNYWRQLLNAKLITQRKFDNLTKAERGGLSELDKAGFIKRQLVETRQITKHVAQILDSRMNTKYDENDKLIREVKVITLKSKLVSDFRKDFQFYKVREINNYHHAHDAYLNAVVGTALIKKYPKLESEFVYGDYKVYDVRKMIAKSEQEIGKATAKYFFYSNIMNFFKTEITLANGEIRKRPLIETNGETGEIVWDKGRDFATVRKVLSMPQVNIVKKTEVQTGGFSKESILPKRNSDKLIARKKDWDPKKYGGFDSPTVAYSVLVVAKVEKGKSKKLKSVKELLGITIMERSSFEKNPIDFLEAKGYKEVKKDLIIKLPKYSLFELENGRKRMLASAGELQKGNELALPSKYVNFLYLASHYEKLKGSPEDNEQKQLFVEQHKHYLDEIIEQISEFSKRVILADANLDKVLSAYNKHRDKPIREQAENIIHLFTLTNLGAPAAFKYFDTTIDRKRYTSTKEVLDATLIHQSITGLYETRIDLSQLGGDGGPAPEAAAKGGSGGTLGIEDEYRLHETSTEPDVSLGSTWLSDFPQAWAETGGMGLAVRQAPLIIPLKATSTPVSIQQYPMSHEARLGIKPHIQRLLDQGILVPCQSPWNTPLLPVKKPGTNDYRPVQDLREVNKRVEDIHPTVPNPYNLLSGLPPSHQWYTVLDLKDAFFCLRLHPTSQPLFAFEWRDPGMGISGQLTWTRLPQGFKNSPTLFNEALHRDLADFRIQHPDLILLQYVDDILLAATSELDCQQGTRALLQTLGDLGYRASAKKAQICQKQVKYLGYLLREGQRWLTEARKETVMGQPVPKTPRQLREFLGTAGFCRLWIPGFAEMAAPLYPLTKPGTLFSWGPDQQKAYQEIKQALLTAPALGLPDLTKPFELFVDEKQGYAKGVLTQKLGPWRRPVAYLSKKLDPVAAGWPPCLRMVAAIAVLTKDAGKLTMGQPLVILAPHAVEALVKQPPDRWLSNARMTHYQAMLLDTDRVQFGPVVALNPATLLPLPEEGAPHDCLEILAETHGTRPDLTDQPIPDADHTWYTDGSSFLQEGQRKAGAAVTTETEVIWAGALPAGTSAQRAELIALTQALKMAEGKRLNVYTDSRYAFATAHIHGEIYRRRGWLTSEGREIKNKSEILALLKALFLPKRLSIIHCLGHQKGDSAEARGNRLADQAAREAAIKTPPDTSTLLAGKRTADGSEFEKRTADGSEFESPKKKAKVE

SEQ ID NO: 7264 - protein, 2096 aa, synthetic construct
MPAAKRVKLDGGDKKYSIGLDIGTNSVGWAVITDEYKVPSKKFKVLGNTDRHSIKKNLIGALLFDSGETAEATRLKRTARRRYTRRKNRICYLQEIFSNEMAKVDDSFFHRLEESFLVEEDKKHERHPIFGNIVDEVAYHEKYPTIYHLRKKLVDSTDKADLRLIYLALAHMIKFRGHFLIEGDLNPDNSDVDKLFIQLVQTYNQLFEENPINASGVDAKAILSARLSKSRRLENLIAQLPGEKKNGLFGNLIALSLGLTPNFKSNFDLAEDAKLQLSKDTYDDDLDNLLAQIGDQYADLFLAAKNLSDAILLSDILRVNTEITKAPLSASMIKRYDEHHQDLTLLKALVRQQLPEKYKEIFFDQSKNGYAGYIDGGASQEEFYKFIKPILEKMDGTEELLVKLNREDLLRKQRTFDNGSIPHQIHLGELHAILRRQEDFYPFLKDNREKIEKILTFRIPYYVGPLARGNSRFAWMTRKSEETITPWNFEEVVDKGASAQSFIERMTNFDKNLPNEKVLPKHSLLYEYFTVYNELTKVKYVTEGMRKPAFLSGEQKKAIVDLLFKTNRKVTVKQLKEDYFKKIECFDSVEISGVEDRFNASLGTYHDLLKIIKDKDFLDNEENEDILEDIVLTLTLFEDREMIEERLKTYAHLFDDKVMKQLKRRRYTGWGRLSRKLINGIRDKQSGKTILDFLKSDGFANRNFMQLIHDDSLTFKEDIQKAQVSGQGDSLHEHIANLAGSPAIKKGILQTVKVVDELVKVMGRHKPENIVIEMARENQTTQKGQKNSRERMKRIEEGIKELGSQILKEHPVENTQLQNEKLYLYYLQNGRDMYVDQELDINRLSDYDVDHIVPQSFLKDDSIDNKVLTRSDKARGKSDNVPSEEVVKKMKNYWRQLLNAKLITQRKFDNLTKAERGGLSELDKAGFIKRQLVETRQITKHVAQILDSRMNTKYDENDKLIREVKVITLKSKLVSDFRKDFQFYKVREINNYHHAHDAYLNAVVGTALIKKYPKLESEFVYGDYKVYDVRKMIAKSEQEIGKATAKYFFYSNIMNFFKTEITLANGEIRKRPLIETNGETGEIVWDKGRDFATVRKVLSMPQVNIVKKTEVQTGGFSKESILPKRNSDKLIARKKDWDPKKYGGFDSPTVAYSVLVVAKVEKGKSKKLKSVKELLGITIMERSSFEKNPIDFLEAKGYKEVKKDLIIKLPKYSLFELENGRKRMLASAGELQKGNELALPSKYVNFLYLASHYEKLKGSPEDNEQKQLFVEQHKHYLDEIIEQISEFSKRVILADANLDKVLSAYNKHRDKPIREQAENIIHLFTLTNLGAPAAFKYFDTTIDRKRYTSTKEVLDATLIHQSITGLYETRIDLSQLGGDGGPAPEAAAKGGSGGTLNIEDEYRLHETSKGPDVPLGSTWLSDFPQAWAETGGMGLAVRQAPLIIPLKATSTPVSIKQYPMSQEARLGIKPHIQRLLDQGILVPCQSPWNTPLLPVKKPGTNDYRPVQDLREVNKRVEDIHPTVPNPYNLLSGLPPSHQWYTVLDLKDAFFCLRLHPTSQSLFAFEWRDPEMGISGQLTWTRLPQGFKNSPTLFNEALHRDLADFRIQHPDLILLQYVDDLLLAATSELDCQQGTRALLQTLGDLGYRASAKKAQICQKQVKYLGYLLKEGQRWLTEARKETVMGQPTPKTPRQLREFLGTAGFCRLWIPGFAEMAAPLYPLTKPGTLFEWGPDQQKAYQEIKQALLTAPALGLPDLTKPFELFVDEKQGYAKGVLTQKLGPWRRPVAYLSKKLDPVAAGWPPCLRMVAAIAVLTKDAGKLTMGQPLVILAPHAVEALVKQPPDRWLSNARMTHYQALLLDTDRVQFGPIVALNPATLLPLPEEGLQHDCLDILAEAHGTRPDLTDQPLPDADHTWYTDGSSFLQEGQRKAGAAVTTETEVVWAKALPAGTSAQRAELIALTQALKMAEGKKLNVYTDSRYAFATAHIHGEIYRRRGWLTSEGKEIKNKDEILALLKALFLPKRLSIIHCPGHQKGNRAEARGNRMADQAAREVATRETPETSTLLAGKRTADGSEFEKRTADGSEFESPKKKAKVE

SEQ ID NO: 7265 - protein, 2088 aa, synthetic construct; identical to SEQ ID NO: 4529

SEQ ID NO: 7266 - protein, 2090 aa, synthetic construct
MPAAKRVKLDGGDKKYSIGLDIGTNSVGWAVITDEYKVPSKKFKVLGNTDRHSIKKNLIGALLFDSGETAEATRLKRTARRRYTRRKNRICYLQEIFSNEMAKVDDSFFHRLEESFLVEEDKKHERHPIFGNIVDEVAYHEKYPTIYHLRKKLVDSTDKADLRLIYLALAHMIKFRGHFLIEGDLNPDNSDVDKLFIQLVQTYNQLFEENPINASGVDAKAILSARLSKSRRLENLIAQLPGEKKNGLFGNLIALSLGLTPNFKSNFDLAEDAKLQLSKDTYDDDLDNLLAQIGDQYADLFLAAKNLSDAILLSDILRVNTEITKAPLSASMIKRYDEHHQDLTLLKALVRQQLPEKYKEIFFDQSKNGYAGYIDGGASQEEFYKFIKPILEKMDGTEELLVKLNREDLLRKQRTFDNGSIPHQIHLGELHAILRRQEDFYPFLKDNREKIEKILTFRIPYYVGPLARGNSRFAWMTRKSEETITPWNFEEVVDKGASAQSFIERMTNFDKNLPNEKVLPKHSLLYEYFTVYNELTKVKYVTEGMRKPAFLSGEQKKAIVDLLFKTNRKVTVKQLKEDYFKKIECFDSVEISGVEDRFNASLGTYHDLLKIIKDKDFLDNEENEDILEDIVLTLTLFEDREMIEERLKTYAHLFDDKVMKQLKRRRYTGWGRLSRKLINGIRDKQSGKTILDFLKSDGFANRNFMQLIHDDSLTFKEDIQKAQVSGQGDSLHEHIANLAGSPAIKKGILQTVKVVDELVKVMGRHKPENIVIEMARENQTTQKGQKNSRERMKRIEEGIKELGSQILKEHPVENTQLQNEKLYLYYLQNGRDMYVDQELDINRLSDYDVDHIVPQSFLKDDSIDNKVLTRSDKARGKSDNVPSEEVVKKMKNYWRQLLNAKLITQRKFDNLTKAERGGLSELDKAGFIKRQLVETRQITKHVAQILDSRMNTKYDENDKLIREVKVITLKSKLVSDFRKDFQFYKVREINNYHHAHDAYLNAVVGTALIKKYPKLESEFVYGDYKVYDVRKMIAKSEQEIGKATAKYFFYSNIMNFFKTEITLANGEIRKRPLIETNGETGEIVWDKGRDFATVRKVLSMPQVNIVKKTEVQTGGFSKESILPKRNSDKLIARKKDWDPKKYGGFDSPTVAYSVLVVAKVEKGKSKKLKSVKELLGITIMERSSFEKNPIDFLEAKGYKEVKKDLIIKLPKYSLFELENGRKRMLASAGELQKGNELALPSKYVNFLYLASHYEKLKGSPEDNEQKQLFVEQHKHYLDEIIEQISEFSKRVILADANLDKVLSAYNKHRDKPIREQAENIIHLFTLTNLGAPAAFKYFDTTIDRKRYTSTKEVLDATLIHQSITGLYETRIDLSQLGGDGGPAPEAAAKGGSGGTLQLDDEYRLYSPLVKPDQNIQFWLEQFPQAWAETAGMGLAKQVPPQVIQLKASATPVSVRQYPLSKEAQEGIRPHVQRLIQQGILVPVQSPWNTPLLPVRKPGTNDYRPVQDLREVNKRVQDIHPTVPNPYNLLCALPPQRSWYTVLDLKDAFFCLRLHPTSQPLFAFEWRDPGTGRTGQLTWTRLPQGFKNSPTIFDEALHRDLANFRIQHPQVTLLQYVDDLLLAGATKQDCLEGTKALLLELSDLGYRASAKKAQICRREVTYLGYSLRDGQRWLTEARKKTVVQIPAPTTAKQVREFLGTAGFCRLWIPGFATLAAPLYPLTKEKGEFSWAPEHQKAFDAIKKALLSAPALALPDVTKPFTLYVDERKGVARGVLTQTLGPWRRPVAYLSKKLDPVASGWPVCLKAIAAVAILVKDADKLTLGQNITVIAPHALENIVRQPPDRWMTNARMTHYQSLLLTERVTFAPPAALNPATLLPEETDEPVTHDCHQLLIEETGVRKDLTDIPLTGEVLTWFTDGSSYVVEGKRMAGAAVVDGTRTIWASSLPEGTSAQKAELMALTQALRLAEGKSINIYTDSRYAFATAHVHGAIYKQRGLLTSAGREIKNKEEILSLLEALHLPKRLAIIHCPGHQKAKDPISRGNQMADRVAKQAAQGVNLLAGKRTADGSEFEKRTADGSEFESPKKKAKVE

SEQ ID NO: 7267 - protein, 2088 aa, synthetic construct; identical to SEQ ID NO: 4529

SEQ ID NO: 7268 - protein, 2176 aa, synthetic construct
MPAAKRVKLDGGDKKYSIGLDIGTNSVGWAVITDEYKVPSKKFKVLGNTDRHSIKKNLIGALLFDSGETAEATRLKRTARRRYTRRKNRICYLQEIFSNEMAKVDDSFFHRLEESFLVEEDKKHERHPIFGNIVDEVAYHEKYPTIYHLRKKLVDSTDKADLRLIYLALAHMIKFRGHFLIEGDLNPDNSDVDKLFIQLVQTYNQLFEENPINASGVDAKAILSARLSKSRRLENLIAQLPGEKKNGLFGNLIALSLGLTPNFKSNFDLAEDAKLQLSKDTYDDDLDNLLAQIGDQYADLFLAAKNLSDAILLSDILRVNTEITKAPLSASMIKRYDEHHQDLTLLKALVRQQLPEKYKEIFFDQSKNGYAGYIDGGASQEEFYKFIKPILEKMDGTEELLVKLNREDLLRKQRTFDNGSIPHQIHLGELHAILRRQEDFYPFLKDNREKIEKILTFRIPYYVGPLARGNSRFAWMTRKSEETITPWNFEEVVDKGASAQSFIERMTNFDKNLPNEKVLPKHSLLYEYFTVYNELTKVKYVTEGMRKPAFLSGEQKKAIVDLLFKTNRKVTVKQLKEDYFKKIECFDSVEISGVEDRFNASLGTYHDLLKIIKDKDFLDNEENEDILEDIVLTLTLFEDREMIEERLKTYAHLFDDKVMKQLKRRRYTGWGRLSRKLINGIRDKQSGKTILDFLKSDGFANRNFMQLIHDDSLTFKEDIQKAQVSGQGDSLHEHIANLAGSPAIKKGILQTVKVVDELVKVMGRHKPENIVIEMARENQTTQKGQKNSRERMKRIEEGIKELGSQILKEHPVENTQLQNEKLYLYYLQNGRDMYVDQELDINRLSDYDVDHIVPQSFLKDDSIDNKVLTRSDKARGKSDNVPSEEVVKKMKNYWRQLLNAKLITQRKFDNLTKAERGGLSELDKAGFIKRQLVETRQITKHVAQILDSRMNTKYDENDKLIREVKVITLKSKLVSDFRKDFQFYKVREINNYHHAHDAYLNAVVGTALIKKYPKLESEFVYGDYKVYDVRKMIAKSEQEIGKATAKYFFYSNIMNFFKTEITLANGEIRKRPLIETNGETGEIVWDKGRDFATVRKVLSMPQVNIVKKTEVQTGGFSKESILPKRNSDKLIARKKDWDPKKYGGFDSPTVAYSVLVVAKVEKGKSKKLKSVKELLGITIMERSSFEKNPIDFLEAKGYKEVKKDLIIKLPKYSLFELENGRKRMLASAGELQKGNELALPSKYVNFLYLASHYEKLKGSPEDNEQKQLFVEQHKHYLDEIIEQISEFSKRVILADANLDKVLSAYNKHRDKPIREQAENIIHLFTLTNLGAPAAFKYFDTTIDRKRYTSTKEVLDATLIHQSITGLYETRIDLSQLGGDGGPAPEAAAKGGSGGMDPLQLLQPLEAEIKGTKLKAHWNSGATITCVPEAFLEDERPIQTMLIKTIHGEKQQDVYYLTFKVQGRKVEAEVLASPYDYILLNPSDVPWLMKKPLQLTVLVPLHEYQERLLQQTALPKEQKELLQKLFLKYDALWQHWENQVGHRRIKPHNIATGTLAPRPQKQYPINPKAKPSIQIVIDDLLKQGVLIQQNSTMNTPVYPVPKPDGKWRMVLDYREVNKTIPLIAAQNQHSAGILSSIYRGKYKTTLDLTNGFWAHPITPESYWLTAFTWQGKQYCWTRLPQGFLNSPALFTADVVDLLKEIPNVQAYVDDIYISHDDPQEHLEQLEKIFSILLNAGYVVSLKKSEIAQREVEFLGFNITKEGRGLTDTFKQKLLNITPPKDLKQLQSILGLLNFARNFIPNYSELVKPLYTIVANANGKFISWTEDNSNQLQHIISVLNQADNLEERNPETRLIIKVNSSPSAGYIRYYNEGSKRPIMYVNYIFSKAEAKFTQTEKLLTTMHKGLIKAMDLAMGQEILVYSPIVSMTKIQRTPLPERKALPVRWITWMTYLEDPRIQFHYDKSLPELQQIPNVTEDVIAKTKHPSEFAMVFYTDGSAIKHPDVNKSHSAGMGIAQVQFIPEYKIVHQWSIPLGDHTAQLAEIAAVEFACKKALKISGPVLIVTDSFYVAESANKELPYWKSNGFLNNKKKPLRHVSKWKSIAECLQLKPDIIIMHEKGHQQPMTTLHTEGNNLADKLATQGSYVVHAGKRTADGSEFEKRTADGSEFESPKKKAKVE

SEQ ID NO: 7269 - protein, 2087 aa, synthetic construct
MPAAKRVKLDGGDKKYSIGLDIGTNSVGWAVITDEYKVPSKKFKVLGNTDRHSIKKNLIGALLFDSGETAEATRLKRTARRRYTRRKNRICYLQEIFSNEMAKVDDSFFHRLEESFLVEEDKKHERHPIFGNIVDEVAYHEKYPTIYHLRKKLVDSTDKADLRLIYLALAHMIKFRGHFLIEGDLNPDNSDVDKLFIQLVQTYNQLFEENPINASGVDAKAILSARLSKSRRLENLIAQLPGEKKNGLFGNLIALSLGLTPNFKSNFDLAEDAKLQLSKDTYDDDLDNLLAQIGDQYADLFLAAKNLSDAILLSDILRVNTEITKAPLSASMIKRYDEHHQDLTLLKALVRQQLPEKYKEIFFDQSKNGYAGYIDGGASQEEFYKFIKPILEKMDGTEELLVKLNREDLLRKQRTFDNGSIPHQIHLGELHAILRRQEDFYPFLKDNREKIEKILTFRIPYYVGPLARGNSRFAWMTRKSEETITPWNFEEVVDKGASAQSFIERMTNFDKNLPNEKVLPKHSLLYEYFTVYNELTKVKYVTEGMRKPAFLSGEQKKAIVDLLFKTNRKVTVKQLKEDYFKKIECFDSVEISGVEDRFNASLGTYHDLLKIIKDKDFLDNEENEDILEDIVLTLTLFEDREMIEERLKTYAHLFDDKVMKQLKRRRYTGWGRLSRKLINGIRDKQSGKTILDFLKSDGFANRNFMQLIHDDSLTFKEDIQKAQVSGQGDSLHEHIANLAGSPAIKKGILQTVKVVDELVKVMGRHKPENIVIEMARENQTTQKGQKNSRERMKRIEEGIKELGSQILKEHPVENTQLQNEKLYLYYLQNGRDMYVDQELDINRLSDYDVDHIVPQSFLKDDSIDNKVLTRSDKARGKSDNVPSEEVVKKMKNYWRQLLNAKLITQRKFDNLTKAERGGLSELDKAGFIKRQLVETRQITKHVAQILDSRMNTKYDENDKLIREVKVITLKSKLVSDFRKDFQFYKVREINNYHHAHDAYLNAVVGTALIKKYPKLESEFVYGDYKVYDVRKMIAKSEQEIGKATAKYFFYSNIMNFFKTEITLANGEIRKRPLIETNGETGEIVWDKGRDFATVRKVLSMPQVNIVKKTEVQTGGFSKESILPKRNSDKLIARKKDWDPKKYGGFDSPTVAYSVLVVAKVEKGKSKKLKSVKELLGITIMERSSFEKNPIDFLEAKGYKEVKKDLIIKLPKYSLFELENGRKRMLASAGELQKGNELALPSKYVNFLYLASHYEKLKGSPEDNEQKQLFVEQHKHYLDEIIEQISEFSKRVILADANLDKVLSAYNKHRDKPIREQAENIIHLFTLTNLGAPAAFKYFDTTIDRKRYTSTKEVLDATLIHQSITGLYETRIDLSQLGGDGGPAPEAAAKGGSGGIPWLMKKPLQLTTLVPLQEYEERLLKQTMLTGSYKEKLQSLFLKYDALWQHWENQVGHRRIKPHHIATGTVNPRPQKQYPINPKAKASIQTVINDLLKQGVLIQQNSIMNTPVYPVPKPDGKWRMVLDYREVNKTIPLIAAQNQHSAGILSSIFRGKYKTTLDLSNGFWAHSITPESYWLTAFTWLGQQYCWTRLPQGFLNSPALFNADVVDLLKEVPNVQVYVDDIYISHDDPREHLEQLEKVFSLLLNAGYVVSLKKSEIAQHEVEFLGFNITKEGRGLTETFKQKLLNITPPRDLKQLQSILGKLNFARNFIPNFSELVKPLYNIIATAPGKYITWTTDNSQQLQNIISMLNSAENLEERNPEVRLIMKVNTSPSAGYIRFYNEFAKRPIMYLNYVYTKAEVKFTNTEKLLTTIHKGLIKALDLGMGQEILVYSPIVSMTKIQKTPLPERKALPIRWITWMSYLEDPRIQFHYDKTLPELQQVPTVTDDIIAKIKHPSEFSMVFYTDGSAIKHPNVNKSHNAGMGIAQVQFKPEFTVINTWSIPLGDHTAQLAEVAAVEFACKKALKIDGPVLIVTDSFYVAESVNKELPYWQSNGFFNNKKKPLKHVSKWKSIADCIQLKPDIIIIHEKGHQPTASTFHTEGNNLADKLATQGSYVVNAGKRTADGSEFEKRTADGSEFESPKKKAKVE

SEQ ID NO: 7270 - protein, 2176 aa, synthetic construct
MPAAKRVKLDGGDKKYSIGLDIGTNSVGWAVITDEYKVPSKKFKVLGNTDRHSIKKNLIGALLFDSGETAEATRLKRTARRRYTRRKNRICYLQEIFSNEMAKVDDSFFHRLEESFLVEEDKKHERHPIFGNIVDEVAYHEKYPTIYHLRKKLVDSTDKADLRLIYLALAHMIKFRGHFLIEGDLNPDNSDVDKLFIQLVQTYNQLFEENPINASGVDAKAILSARLSKSRRLENLIAQLPGEKKNGLFGNLIALSLGLTPNFKSNFDLAEDAKLQLSKDTYDDDLDNLLAQIGDQYADLFLAAKNLSDAILLSDILRVNTEITKAPLSASMIKRYDEHHQDLTLLKALVRQQLPEKYKEIFFDQSKNGYAGYIDGGASQEEFYKFIKPILEKMDGTEELLVKLNREDLLRKQRTFDNGSIPHQIHLGELHAILRRQEDFYPFLKDNREKIEKILTFRIPYYVGPLARGNSRFAWMTRKSEETITPWNFEEVVDKGASAQSFIERMTNFDKNLPNEKVLPKHSLLYEYFTVYNELTKVKYVTEGMRKPAFLSGEQKKAIVDLLFKTNRKVTVKQLKEDYFKKIECFDSVEISGVEDRFNASLGTYHDLLKIIKDKDFLDNEENEDILEDIVLTLTLFEDREMIEERLKTYAHLFDDKVMKQLKRRRYTGWGRLSRKLINGIRDKQSGKTILDFLKSDGFANRNFMQLIHDDSLTFKEDIQKAQVSGQGDSLHEHIANLAGSPAIKKGILQTVKVVDELVKVMGRHKPENIVIEMARENQTTQKGQKNSRERMKRIEEGIKELGSQILKEHPVENTQLQNEKLYLYYLQNGRDMYVDQELDINRLSDYDVDHIVPQSFLKDDSIDNKVLTRSDKARGKSDNVPSEEVVKKMKNYWRQLLNAKLITQRKFDNLTKAERGGLSELDKAGFIKRQLVETRQITKHVAQILDSRMNTKYDENDKLIREVKVITLKSKLVSDFRKDFQFYKVREINNYHHAHDAYLNAVVGTALIKKYPKLESEFVYGDYKVYDVRKMIAKSEQEIGKATAKYFFYSNIMNFFKTEITLANGEIRKRPLIETNGETGEIVWDKGRDFATVRKVLSMPQVNIVKKTEVQTGGFSKESILPKRNSDKLIARKKDWDPKKYGGFDSPTVAYSVLVVAKVEKGKSKKLKSVKELLGITIMERSSFEKNPIDFLEAKGYKEVKKDLIIKLPKYSLFELENGRKRMLASAGELQKGNELALPSKYVNFLYLASHYEKLKGSPEDNEQKQLFVEQHKHYLDEIIEQISEFSKRVILADANLDKVLSAYNKHRDKPIREQAENIIHLFTLTNLGAPAAFKYFDTTIDRKRYTSTKEVLDATLIHQSITGLYETRIDLSQLGGDGGPAPEAAAKGGSGGMDPLQLLQPLEAEIKGTKLKAHWNSGATITCVPQAFLEEEVPIKNIWIKTIHGEKEQPVYYLTFKIQGRKVEAEVISSPYDYILVSPSDIPWLMKKPLQLTTLVPLQEYEERLLKQTMLTGSYKEKLQSLFLKYDALWQHWENQVGHRRIKPHHIATGTVNPRPQKQYPINPKAKASIQTVINDLLKQGVLIQQNSIMNTPVYPVPKPDGKWRMVLDYREVNKTIPLIAAQNQHSAGILSSIFRGKYKTTLDLSNGFWAHSITPESYWLTAFTWLGQQYCWTRLPQGFLNSPALFNADVVDLLKEVPNVQVYVDDIYISHDDPREHLEQLEKVFSLLLNAGYVVSLKKSEIAQHEVEFLGFNITKEGRGLTETFKQKLLNITPPRDLKQLQSILGKLNFARNFIPNFSELVKPLYNIIATAPGKYITWTTDNSQQLQNIISMLNSAENLEERNPEVRLIMKVNTSPSAGYIRFYNEFAKRPIMYLNYVYTKAEVKFTNTEKLLTTIHKGLIKALDLGMGQEILVYSPIVSMTKIQKTPLPERKALPIRWITWMSYLEDPRIQFHYDKTLPELQQVPTVTDDIIAKIKHPSEFSMVFYTDGSAIKHPNVNKSHNAGMGIAQVQFKPEFTVINTWSIPLGDHTAQLAEVAAVEFACKKALKIDGPVLIVTDSFYVAESVNKELPYWQSNGFFNNKKKPLKHVSKWKSIADCIQLKPDIIIIHEKGHQPTASTFHTEGNNLADKLATQGSYVVNAGKRTADGSEFEKRTADGSEFESPKKKAKVE

SEQ ID NO: 7271 - protein, 2094 aa, synthetic construct
MPAAKRVKLDGGDKKYSIGLDIGTNSVGWAVITDEYKVPSKKFKVLGNTDRHSIKKNLIGALLFDSGETAEATRLKRTARRRYTRRKNRICYLQEIFSNEMAKVDDSFFHRLEESFLVEEDKKHERHPIFGNIVDEVAYHEKYPTIYHLRKKLVDSTDKADLRLIYLALAHMIKFRGHFLIEGDLNPDNSDVDKLFIQLVQTYNQLFEENPINASGVDAKAILSARLSKSRRLENLIAQLPGEKKNGLFGNLIALSLGLTPNFKSNFDLAEDAKLQLSKDTYDDDLDNLLAQIGDQYADLFLAAKNLSDAILLSDILRVNTEITKAPLSASMIKRYDEHHQDLTLLKALVRQQLPEKYKEIFFDQSKNGYAGYIDGGASQEEFYKFIKPILEKMDGTEELLVKLNREDLLRKQRTFDNGSIPHQIHLGELHAILRRQEDFYPFLKDNREKIEKILTFRIPYYVGPLARGNSRFAWMTRKSEETITPWNFEEVVDKGASAQSFIERMTNFDKNLPNEKVLPKHSLLYEYFTVYNELTKVKYVTEGMRKPAFLSGEQKKAIVDLLFKTNRKVTVKQLKEDYFKKIECFDSVEISGVEDRFNASLGTYHDLLKIIKDKDFLDNEENEDILEDIVLTLTLFEDREMIEERLKTYAHLFDDKVMKQLKRRRYTGWGRLSRKLINGIRDKQSGKTILDFLKSDGFANRNFMQLIHDDSLTFKEDIQKAQVSGQGDSLHEHIANLAGSPAIKKGILQTVKVVDELVKVMGRHKPENIVIEMARENQTTQKGQKNSRERMKRIEEGIKELGSQILKEHPVENTQLQNEKLYLYYLQNGRDMYVDQELDINRLSDYDVDHIVPQSFLKDDSIDNKVLTRSDKARGKSDNVPSEEVVKKMKNYWRQLLNAKLITQRKFDNLTKAERGGLSELDKAGFIKRQLVETRQITKHVAQILDSRMNTKYDENDKLIREVKVITLKSKLVSDFRKDFQFYKVREINNYHHAHDAYLNAVVGTALIKKYPKLESEFVYGDYKVYDVRKMIAKSEQEIGKATAKYFFYSNIMNFFKTEITLANGEIRKRPLIETNGETGEIVWDKGRDFATVRKVLSMPQVNIVKKTEVQTGGFSKESILPKRNSDKLIARKKDWDPKKYGGFDSPTVAYSVLVVAKVEKGKSKKLKSVKELLGITIMERSSFEKNPIDFLEAKGYKEVKKDLIIKLPKYSLFELENGRKRMLASAGELQKGNELALPSKYVNFLYLASHYEKLKGSPEDNEQKQLFVEQHKHYLDEIIEQISEFSKRVILADANLDKVLSAYNKHRDKPIREQAENIIHLFTLTNLGAPAAFKYFDTTIDRKRYTSTKEVLDATLIHQSITGLYETRIDLSQLGGDGGPAPEAAAKGGSGGVLNLEEEYRLHEKPVPSSIDPSWLQLFPTVWAERAGMGLANQVPPVVVELRSGASPVAVRQYPMSKEAREGIRPHIQRFLDLGVLVPCQSPWNTPLLPVKKPGTNDYRPVQDLREINKRVQDIHPTVPNPYNLLSSLPPSHTWYSVLDLKDAFFCLKLHPNSQPLFAFEWRDPEKGNTGQLTWTRLPQGFKNSPTLFDEALHRDLAPFRALNPQVVLLQYVDDLLVAAPTYRDCKEGTQKLLQELSKLGYRVSAKKAQLCQKEVTYLGYLLKEGKRWLTPARKATVMKIPPPTTPRQVREFLGTAGFCRLWIPGFASLAAPLYPLTKESIPFIWTEEHQKAFDRIKEALLSAPALALPDLTKPFTLYVDERAGVARGVLTQTLGPWRRPVAYLSKKLDPVASGWPTCLKAVAAVALLLKDADKLTLGQNVTVIASHSLESIVRQPPDRWMTNARMTHYQSLLLNERVSFAPPAVLNPATLLPVESEATPVHRCSEILAEETGTRRDLKDQPLPGVPAWYTDGSSFIAEGKRRAGAAIVDGKRTVWASSLPEGTSAQKAELVALTQALRLAEGKDINIYTDSRYAFATAHIHGAIYKQRGLLTSAGKDIKNKEEILALLEAIHLPKRVAIIHCPGHQKGNDPVATGNRRADEAAKQAALSTRVLAETTKPAGKRTADGSEFEKRTADGSEFESPKKKAKVE

SEQ ID NO: 7272 - protein, 2096 aa, synthetic construct
MPAAKRVKLDGGDKKYSIGLDIGTNSVGWAVITDEYKVPSKKFKVLGNTDRHSIKKNLIGALLFDSGETAEATRLKRTARRRYTRRKNRICYLQEIFSNEMAKVDDSFFHRLEESFLVEEDKKHERHPIFGNIVDEVAYHEKYPTIYHLRKKLVDSTDKADLRLIYLALAHMIKFRGHFLIEGDLNPDNSDVDKLFIQLVQTYNQLFEENPINASGVDAKAILSARLSKSRRLENLIAQLPGEKKNGLFGNLIALSLGLTPNFKSNFDLAEDAKLQLSKDTYDDDLDNLLAQIGDQYADLFLAAKNLSDAILLSDILRVNTEITKAPLSASMIKRYDEHHQDLTLLKALVRQQLPEKYKEIFFDQSKNGYAGYIDGGASQEEFYKFIKPILEKMDGTEELLVKLNREDLLRKQRTFDNGSIPHQIHLGELHAILRRQEDFYPFLKDNREKIEKILTFRIPYYVGPLARGNSRFAWMTRKSEETITPWNFEEVVDKGASAQSFIERMTNFDKNLPNEKVLPKHSLLYEYFTVYNELTKVKYVTEGMRKPAFLSGEQKKAIVDLLFKTNRKVTVKQLKEDYFKKIECFDSVEISGVEDRFNASLGTYHDLLKIIKDKDFLDNEENEDILEDIVLTLTLFEDREMIEERLKTYAHLFDDKVMKQLKRRRYTGWGRLSRKLINGIRDKQSGKTILDFLKSDGFANRNFMQLIHDDSLTFKEDIQKAQVSGQGDSLHEHIANLAGSPAIKKGILQTVKVVDELVKVMGRHKPENIVIEMARENQTTQKGQKNSRERMKRIEEGIKELGSQILKEHPVENTQLQNEKLYLYYLQNGRDMYVDQELDINRLSDYDVDHIVPQSFLKDDSIDNKVLTRSDKARGKSDNVPSEEVVKKMKNYWRQLLNAKLITQRKFDNLTKAERGGLSELDKAGFIKRQLVETRQITKHVAQILDSRMNTKYDENDKLIREVKVITLKSKLVSDFRKDFQFYKVREINNYHHAHDAYLNAVVGTALIKKYPKLESEFVYGDYKVYDVRKMIAKSEQEIGKATAKYFFYSNIMNFFKTEITLANGEIRKRPLIETNGETGEIVWDKGRDFATVRKVLSMPQVNIVKKTEVQTGGFSKESILPKRNSDKLIARKKDWDPKKYGGFDSPTVAYSVLVVAKVEKGKSKKLKSVKELLGITIMERSSFEKNPIDFLEAKGYKEVKKDLIIKLPKYSLFELENGRKRMLASAGELQKGNELALPSKYVNFLYLASHYEKLKGSPEDNEQKQLFVEQHKHYLDEIIEQISEFSKRVILADANLDKVLSAYNKHRDKPIREQAENIIHLFTLTNLGAPAAFKYFDTTIDRKRYTSTKEVLDATLIHQSITGLYETRIDLSQLGGDGGPAPEAAAKGGSGGTLNIEDEYRLHETSKEPDVPLGSTWLSDFPQAWAETGGMGLAVRQAPLIIPLKATSTPVSIKQYPMSQEARLGIKPHIQRLLDQGILVPCQSPWNTPLLPVKKPGTNDYRPVQDLREVNKRVEDIHPTVPNPYNLLSGLPPSHQWYTVLDLKDAFFCLRLHPTSQPLFAFEWRDPEMGISGQLTWTRLPQGFKNSPTLFNEALHRDLADFRIQHPDLILLQYVDDLLLAATSEQDCQRGTRALLQTLGNLGYRASAKKAQICQKQVKYLGYLLKEGQRWLTEARKETVMGQPTPKTPRQLREFLGTAGFCRLWIPGFAEMAAPLYPLTKPGTLFNWGPDQQKAYQEIKQALLTAPALGLPDLTKPFELFVDEKQGYAKGVLTQKLGPWRRPVAYLSKKLDPVAAGWPPCLRMVAAIAVLTKDAGKLTMGQPLVILAPHAVEALVKQPPDRWLSNARMTHYQAMLLDTDRVQFGPVVALNPATLLPLPEKEAPHDCLEILAETHGTRPDLTDQPIPDADYTWYTDGSSFLQEGQRRAGAAVTTETEVIWARALPAGTSAQRAELIALTQALKMAEGKKLNVYTDSRYAFATAHVHGEIYRRRGWLTSEGREIKNKNEILALLKALFLPKRLSIIHCPGHQKGNSAEARGNRMADQAAREAAMKAVLETSTLLAGKRTADGSEFEKRTADGSEFESPKKKAKVE

SEQ ID NO: 7273 - protein, 2098 aa, synthetic construct
MPAAKRVKLDGGDKKYSIGLDIGTNSVGWAVITDEYKVPSKKFKVLGNTDRHSIKKNLIGALLFDSGETAEATRLKRTARRRYTRRKNRICYLQEIFSNEMAKVDDSFFHRLEESFLVEEDKKHERHPIFGNIVDEVAYHEKYPTIYHLRKKLVDSTDKADLRLIYLALAHMIKFRGHFLIEGDLNPDNSDVDKLFIQLVQTYNQLFEENPINASGVDAKAILSARLSKSRRLENLIAQLPGEKKNGLFGNLIALSLGLTPNFKSNFDLAEDAKLQLSKDTYDDDLDNLLAQIGDQYADLFLAAKNLSDAILLSDILRVNTEITKAPLSASMIKRYDEHHQDLTLLKALVRQQLPEKYKEIFFDQSKNGYAGYIDGGASQEEFYKFIKPILEKMDGTEELLVKLNREDLLRKQRTFDNGSIPHQIHLGELHAILRRQEDFYPFLKDNREKIEKILTFRIPYYVGPLARGNSRFAWMTRKSEETITPWNFEEVVDKGASAQSFIERMTNFDKNLPNEKVLPKHSLLYEYFTVYNELTKVKYVTEGMRKPAFLSGEQKKAIVDLLFKTNRKVTVKQLKEDYFKKIECFDSVEISGVEDRFNASLGTYHDLLKIIKDKDFLDNEENEDILEDIVLTLTLFEDREMIEERLKTYAHLFDDKVMKQLKRRRYTGWGRLSRKLINGIRDKQSGKTILDFLKSDGFANRNFMQLIHDDSLTFKEDIQKAQVSGQGDSLHEHIANLAGSPAIKKGILQTVKVVDELVKVMGRHKPENIVIEMARENQTTQKGQKNSRERMKRIEEGIKELGSQILKEHPVENTQLQNEKLYLYYLQNGRDMYVDQELDINRLSDYDVDHIVPQSFLKDDSIDNKVLTRSDKARGKSDNVPSEEVVKKMKNYWRQLLNAKLITQRKFDNLTKAERGGLSELDKAGFIKRQLVETRQITKHVAQILDSRMNTKYDENDKLIREVKVITLKSKLVSDFRKDFQFYKVREINNYHHAHDAYLNAVVGTALIKKYPKLESEFVYGDYKVYDVRKMIAKSEQEIGKATAKYFFYSNIMNFFKTEITLANGEIRKRPLIETNGETGEIVWDKGRDFATVRKVLSMPQVNIVKKTEVQTGGFSKESILPKRNSDKLIARKKDWDPKKYGGFDSPTVAYSVLVVAKVEKGKSKKLKSVKELLGITIMERSSFEKNPIDFLEAKGYKEVKKDLIIKLPKYSLFELENGRKRMLASAGELQKGNELALPSKYVNFLYLASHYEKLKGSPEDNEQKQLFVEQHKHYLDEIIEQISEFSKRVILADANLDKVLSAYNKHRDKPIREQAENIIHLFTLTNLGAPAAFKYFDTTIDRKRYTSTKEVLDATLIHQSITGLYETRIDLSQLGGDGGGGGGSSEAAAKGGTAPLEEEYRLFLEAPIQNVTLLEQWKREIPKVWAEINPPGLASTQAPIHVQLLSTALPVRVRQYPITLEAKRSLRETIRKFRAAGILRPVHSPWNTPLLPVRKSGTSEYRMVQDLREVNKRVETIHPTVPNPYTLLSLLPPDRIWYSVLDLKDAFFCIPLAPESQLIFAFEWADAEEGESGQLTWTRLPQGFKNSPTLFNEALNRDLQGFRLDHPSVSLLQYVDDLLIAADTQAACLSATRDLLMTLAELGYRVSGKKAQLCQEEVTYLGFKIHKGSRSLSNSRTQAILQIPVPKTKRQVREFLGTIGYCRLWIPGFAELAQPLYAATRPGNDPLVWGEKEEEAFQSLKLALTQPPALALPSLDKPFQLFVEETSGAAKGVLTQALGPWKRPVAYLSKRLDPVAAGWPRCLRAIAAAALLTREASKLTFGQDIEITSSHNLESLLRSPPDKWLTNARITQYQVLLLDPPRVRFKQTAALNPATLLPETDDTLPIHHCLDTLDSLTSTRPDLTDQPLAQAEATLFTDGSSYIRDGKRYAGAAVVTLDSVIWAEPLPIGTSAQKAELIALTKALEWSKDKSVNIYTDSRYAFATLHVHGMIYRERGWLTAGGKAIKNAPEILALLTAVWLPKRVAVMHCKGHQKDDAPTSTGNRRADEVAREVAIRPLSTQATISAGKRTADGSEFEKRTADGSEFESPKKKAKVE

SEQ ID NO: 7274 - protein, 2218 aa, synthetic construct
MPAAKRVKLDGGDKKYSIGLDIGTNSVGWAVITDEYKVPSKKFKVLGNTDRHSIKKNLIGALLFDSGETAEATRLKRTARRRYTRRKNRICYLQEIFSNEMAKVDDSFFHRLEESFLVEEDKKHERHPIFGNIVDEVAYHEKYPTIYHLRKKLVDSTDKADLRLIYLALAHMIKFRGHFLIEGDLNPDNSDVDKLFIQLVQTYNQLFEENPINASGVDAKAILSARLSKSRRLENLIAQLPGEKKNGLFGNLIALSLGLTPNFKSNFDLAEDAKLQLSKDTYDDDLDNLLAQIGDQYADLFLAAKNLSDAILLSDILRVNTEITKAPLSASMIKRYDEHHQDLTLLKALVRQQLPEKYKEIFFDQSKNGYAGYIDGGASQEEFYKFIKPILEKMDGTEELLVKLNREDLLRKQRTFDNGSIPHQIHLGELHAILRRQEDFYPFLKDNREKIEKILTFRIPYYVGPLARGNSRFAWMTRKSEETITPWNFEEVVDKGASAQSFIERMTNFDKNLPNEKVLPKHSLLYEYFTVYNELTKVKYVTEGMRKPAFLSGEQKKAIVDLLFKTNRKVTVKQLKEDYFKKIECFDSVEISGVEDRFNASLGTYHDLLKIIKDKDFLDNEENEDILEDIVLTLTLFEDREMIEERLKTYAHLFDDKVMKQLKRRRYTGWGRLSRKLINGIRDKQSGKTILDFLKSDGFANRNFMQLIHDDSLTFKEDIQKAQVSGQGDSLHEHIANLAGSPAIKKGILQTVKVVDELVKVMGRHKPENIVIEMARENQTTQKGQKNSRERMKRIEEGIKELGSQILKEHPVENTQLQNEKLYLYYLQNGRDMYVDQELDINRLSDYDVDHIVPQSFLKDDSIDNKVLTRSDKARGKSDNVPSEEVVKKMKNYWRQLLNAKLITQRKFDNLTKAERGGLSELDKAGFIKRQLVETRQITKHVAQILDSRMNTKYDENDKLIREVKVITLKSKLVSDFRKDFQFYKVREINNYHHAHDAYLNAVVGTALIKKYPKLESEFVYGDYKVYDVRKMIAKSEQEIGKATAKYFFYSNIMNFFKTEITLANGEIRKRPLIETNGETGEIVWDKGRDFATVRKVLSMPQVNIVKKTEVQTGGFSKESILPKRNSDKLIARKKDWDPKKYGGFDSPTVAYSVLVVAKVEKGKSKKLKSVKELLGITIMERSSFEKNPIDFLEAKGYKEVKKDLIIKLPKYSLFELENGRKRMLASAGELQKGNELALPSKYVNFLYLASHYEKLKGSPEDNEQKQLFVEQHKHYLDEIIEQISEFSKRVILADANLDKVLSAYNKHRDKPIREQAENIIHLFTLTNLGAPAAFKYFDTTIDRKRYTSTKEVLDATLIHQSITGLYETRIDLSQLGGDGGGGGGSSEAAAKGGTLGDQGSRGSDPLPEPRVTLTVEGIPTEFLVNTGAEHSVLTKPMGKMGSKRTVVAGATGSKVYPWTTKRLLKIGQKQVTHSFLVIPECPAPLLGRDLLTKLKAQIQFSTEGPQVTWEDRPAMCLVLNLEEEYRLHEKPVPPSIDPSWLQLFPMVWAEKAGMGLANQVPPVVVELKSDASPVAVRQYPMSKEAREGIRPHIQRFLDLGILVPCQSPWNTPLLPVKKPGTNDYRPVQDLREVNKRVQDIHPTVPNPYNLLSSLPPSHTWYSVLDLKDAFFCLKLHPNSQPLFAFEWRDPEKGNTGQLTWTRLPQGFKNSPTLFNEALHRDLASFRALNPQVVMLQYVDDLLVAAPTYRDCKEGTRRLLQELSKLGYRVSAKKAQLCREEVTYLGYLLKGGKRWLTPARKATVMKIPTPTTPRQVREFLGTAGFCRLWIPGFASLAAPLYPLTRPKVPFTWTEAHQEAFGRIKEALLSAPALALPDLTKPFALYVDEKEGVARGVLTQTLGPWRRPVAYLSKKLDPVASGWPTCLKAIAAVALLLKDADKLTLGQNVLVIAPHNLESIVRQPPDRWMTNARMTHYQSLLLNERVSFAPPAILNPATLLPVESDDTPIHICSEILAEETGTRPDLRDQPLPGVPAWYTDGSSFIMDGRRQAGAAIVDNKRTVWASNLPEGTSAQKAELIALTQALRLAEGKSINIYTDSRYAFATAHVHGAIYKQRGWLTSAGKDIKNKEEILALLEAIHLPKRVAIIHCPGHQRGTDPVATGNRKADEAAKQAAQSTRILTETTKNAGKRTADGSEFEKRTADGSEFESPKKKAKVE

SEQ ID NO: 7275 - protein, 2096 aa, synthetic construct
MPAAKRVKLDGGDKKYSIGLDIGTNSVGWAVITDEYKVPSKKFKVLGNTDRHSIKKNLIGALLFDSGETAEATRLKRTARRRYTRRKNRICYLQEIFSNEMAKVDDSFFHRLEESFLVEEDKKHERHPIFGNIVDEVAYHEKYPTIYHLRKKLVDSTDKADLRLIYLALAHMIKFRGHFLIEGDLNPDNSDVDKLFIQLVQTYNQLFEENPINASGVDAKAILSARLSKSRRLENLIAQLPGEKKNGLFGNLIALSLGLTPNFKSNFDLAEDAKLQLSKDTYDDDLDNLLAQIGDQYADLFLAAKNLSDAILLSDILRVNTEITKAPLSASMIKRYDEHHQDLTLLKALVRQQLPEKYKEIFFDQSKNGYAGYIDGGASQEEFYKFIKPILEKMDGTEELLVKLNREDLLRKQRTFDNGSIPHQIHLGELHAILRRQEDFYPFLKDNREKIEKILTFRIPYYVGPLARGNSRFAWMTRKSEETITPWNFEEVVDKGASAQSFIERMTNFDKNLPNEKVLPKHSLLYEYFTVYNELTKVKYVTEGMRKPAFLSGEQKKAIVDLLFKTNRKVTVKQLKEDYFKKIECFDSVEISGVEDRFNASLGTYHDLLKIIKDKDFLDNEENEDILEDIVLTLTLFEDREMIEERLKTYAHLFDDKVMKQLKRRRYTGWGRLSRKLINGIRDKQSGKTILDFLKSDGFANRNFMQLIHDDSLTFKEDIQKAQVSGQGDSLHEHIANLAGSPAIKKGILQTVKVVDELVKVMGRHKPENIVIEMARENQTTQKGQKNSRERMKRIEEGIKELGSQILKEHPVENTQLQNEKLYLYYLQNGRDMYVDQELDINRLSDYDVDHIVPQSFLKDDSIDNKVLTRSDKARGKSDNVPSEEVVKKMKNYWRQLLNAKLITQRKFDNLTKAERGGLSELDKAGFIKRQLVETRQITKHVAQILDSRMNTKYDENDKLIREVKVITLKSKLVSDFRKDFQFYKVREINNYHHAHDAYLNAVVGTALIKKYPKLESEFVYGDYKVYDVRKMIAKSEQEIGKATAKYFFYSNIMNFFKTEITLANGEIRKRPLIETNGETGEIVWDKGRDFATVRKVLSMPQVNIVKKTEVQTGGFSKESILPKRNSDKLIARKKDWDPKKYGGFDSPTVAYSVLVVAKVEKGKSKKLKSVKELLGITIMERSSFEKNPIDFLEAKGYKEVKKDLIIKLPKYSLFELENGRKRMLASAGELQKGNELALPSKYVNFLYLASHYEKLKGSPEDNEQKQLFVEQHKHYLDEIIEQISEFSKRVILADANLDKVLSAYNKHRDKPIREQAENIIHLFTLTNLGAPAAFKYFDTTIDRKRYTSTKEVLDATLIHQSITGLYETRIDLSQLGGDGGGGGGSSEAAAKGGTLNLEDEYRLYETSAEPEVSPGSTWLSDFPQAWAETGGMGLAVRQAPLIIPLKATSTPVSIKQYPMSQEAKLGIKPHIQRLLDQGILVPCQSPWNTPLLPVKKPGTNDYRPVQDLREVNKRVEDIHPTVPNPYNLLSGLPPSHRWYTVLDLKDAFFCLRLHPTSQPLFAFEWRDPGMGISGQLTWTRLPQGFKNSPTLFNEALHRDLADFRIQHPDLILLQYVDDILLAATSELDCQQGTRALLLTLGNLGYRASAKKAQLCQKQVKYLGYLLKEGQRWLTEARKETVMGQPTPKTPRQLREFLGKAGFCRLFIPGFAEMAAPLYPLTKPGTLFNWGPDQQKAYQEIKQALLTAPALGLPDLTKPFELFVDEKQGYAKGVLTQKLGPWRRPVAYLSKKLDPVAAGWPPCLRMVAAIAVLRKDAGKLTMGQPLVILAPHAVEALVKQPPDRWLSNARMTHYQAMLLDTDRVQFGPVVALNPATLLPLPEEGAPHDCLEILAETHGTRPDLTDQPIPDADHTWYTDGSSFLQEGQRKAGAAVTTETEVIWARALPAGTSAQRAELIALTQALKMAEGKRLNVYTDSRYAFATAHIHGEIYRRRGWLTSEGREIKNKSEILALLKALFLPKRLSIIHCLGHQKGDSAEARGNRLADQAAREAAIKTPPDTSTLLAGKRTADGSEFEKRTADGSEFESPKKKAKVE

SEQ ID NO: 7276 - protein, 2096 aa, synthetic construct
MPAAKRVKLDGGDKKYSIGLDIGTNSVGWAVITDEYKVPSKKFKVLGNTDRHSIKKNLIGALLFDSGETAEATRLKRTARRRYTRRKNRICYLQEIFSNEMAKVDDSFFHRLEESFLVEEDKKHERHPIFGNIVDEVAYHEKYPTIYHLRKKLVDSTDKADLRLIYLALAHMIKFRGHFLIEGDLNPDNSDVDKLFIQLVQTYNQLFEENPINASGVDAKAILSARLSKSRRLENLIAQLPGEKKNGLFGNLIALSLGLTPNFKSNFDLAEDAKLQLSKDTYDDDLDNLLAQIGDQYADLFLAAKNLSDAILLSDILRVNTEITKAPLSASMIKRYDEHHQDLTLLKALVRQQLPEKYKEIFFDQSKNGYAGYIDGGASQEEFYKFIKPILEKMDGTEELLVKLNREDLLRKQRTFDNGSIPHQIHLGELHAILRRQEDFYPFLKDNREKIEKILTFRIPYYVGPLARGNSRFAWMTRKSEETITPWNFEEVVDKGASAQSFIERMTNFDKNLPNEKVLPKHSLLYEYFTVYNELTKVKYVTEGMRKPAFLSGEQKKAIVDLLFKTNRKVTVKQLKEDYFKKIECFDSVEISGVEDRFNASLGTYHDLLKIIKDKDFLDNEENEDILEDIVLTLTLFEDREMIEERLKTYAHLFDDKVMKQLKRRRYTGWGRLSRKLINGIRDKQSGKTILDFLKSDGFANRNFMQLIHDDSLTFKEDIQKAQVSGQGDSLHEHIANLAGSPAIKKGILQTVKVVDELVKVMGRHKPENIVIEMARENQTTQKGQKNSRERMKRIEEGIKELGSQILKEHPVENTQLQNEKLYLYYLQNGRDMYVDQELDINRLSDYDVDHIVPQSFLKDDSIDNKVLTRSDKARGKSDNVPSEEVVKKMKNYWRQLLNAKLITQRKFDNLTKAERGGLSELDKAGFIKRQLVETRQITKHVAQILDSRMNTKYDENDKLIREVKVITLKSKLVSDFRKDFQFYKVREINNYHHAHDAYLNAVVGTALIKKYPKLESEFVYGDYKVYDVRKMIAKSEQEIGKATAKYFFYSNIMNFFKTEITLANGEIRKRPLIETNGETGEIVWDKGRDFATVRKVLSMPQVNIVKKTEVQTGGFSKESILPKRNSDKLIARKKDWDPKKYGGFDSPTVAYSVLVVAKVEKGKSKKLKSVKELLGITIMERSSFEKNPIDFLEAKGYKEVKKDLIIKLPKYSLFELENGRKRMLASAGELQKGNELALPSKYVNFLYLASHYEKLKGSPEDNEQKQLFVEQHKHYLDEIIEQISEFSKRVILADANLDKVLSAYNKHRDKPIREQAENIIHLFTLTNLGAPAAFKYFDTTIDRKRYTSTKEVLDATLIHQSITGLYETRIDLSQLGGDGGGGGGSSEAAAKGGTLNIEDEYRLHETSKEPDVSLGSTWLSDFPQAWAETGGMGLAVRQAPLIIPLKATSTPVSIKQYPMSQEARLGIKPHIQRLLDQGILVPCQSPWNTPLLPVKKPGTNDYRPVQDLREVNKRVEDIHPTVPNPYNLLSGLPPSHQWYTVLDLKDAFFCLRLHPTSQPLFAFEWRDPEMGISGQLTWTRLPQGFKNSPTLFNEALHRDLAGFRIQHPDLILLQYVDDLLLAATSELDCQQGTRALLQTLGDLGYRASAKKAQICQKQVKYLGYLLKEGQRWLTEARKETVMGQPIPKTPRQLREFLGTAGFCRLWIPGFAEMAAPLYPLTKPGTLFNWGPDQQKAFQEIKQALLTAPALGLPDLTKPFELFVDEKQGYAKGVLTQKLGPWRRPVAYLSKKLDPVAAGWPPCLRMVAAIAVLTKDAGKLTMGQPLVILAPHAVEALVKQPPDRWLSNARMTHYQALLLDTDRVQFGPVVALNPATLLPLPEEGLQHDCLDILAEAHGTRSDLMDQPLPDADHTWYTDGSSFLQEGQRKAGAAVTTETEVIWARALPAGTSAQRAELIALTQALKMAEGKKLNVYTDSRYAFATAHIHGEIYRRRGWLTSEGKEIKNKDEILALLKALFLPKRLSIIHCPGHQKGNSAEARGNRMADQAAREVATRETPETSTLLAGKRTADGSEFEKRTADGSEFESPKKKAKVE

SEQ ID NO: 7277 - protein, 2096 aa, synthetic construct
MPAAKRVKLDGGDKKYSIGLDIGTNSVGWAVITDEYKVPSKKFKVLGNTDRHSIKKNLIGALLFDSGETAEATRLKRTARRRYTRRKNRICYLQEIFSNEMAKVDDSFFHRLEESFLVEEDKKHERHPIFGNIVDEVAYHEKYPTIYHLRKKLVDSTDKADLRLIYLALAHMIKFRGHFLIEGDLNPDNSDVDKLFIQLVQTYNQLFEENPINASGVDAKAILSARLSKSRRLENLIAQLPGEKKNGLFGNLIALSLGLTPNFKSNFDLAEDAKLQLSKDTYDDDLDNLLAQIGDQYADLFLAAKNLSDAILLSDILRVNTEITKAPLSASMIKRYDEHHQDLTLLKALVRQQLPEKYKEIFFDQSKNGYAGYIDGGASQEEFYKFIKPILEKMDGTEELLVKLNREDLLRKQRTFDNGSIPHQIHLGELHAILRRQEDFYPFLKDNREKIEKILTFRIPYYVGPLARGNSRFAWMTRKSEETITPWNFEEVVDKGASAQSFIERMTNFDKNLPNEKVLPKHSLLYEYFTVYNELTKVKYVTEGMRKPAFLSGEQKKAIVDLLFKTNRKVTVKQLKEDYFKKIECFDSVEISGVEDRFNASLGTYHDLLKIIKDKDFLDNEENEDILEDIVLTLTLFEDREMIEERLKTYAHLFDDKVMKQLKRRRYTGWGRLSRKLINGIRDKQSGKTILDFLKSDGFANRNFMQLIHDDSLTFKEDIQKAQVSGQGDSLHEHIANLAGSPAIKKGILQTVKVVDELVKVMGRHKPENIVIEMARENQTTQKGQKNSRERMKRIEEGIKELGSQILKEHPVENTQLQNEKLYLYYLQNGRDMYVDQELDINRLSDYDVDHIVPQSFLKDDSIDNKVLTRSDKARGKSDNVPSEEVVKKMKNYWRQLLNAKLITQRKFDNLTKAERGGLSELDKAGFIKRQLVETRQITKHVAQILDSRMNTKYDENDKLIREVKVITLKSKLVSDFRKDFQFYKVREINNYHHAHDAYLNAVVGTALIKKYPKLESEFVYGDYKVYDVRKMIAKSEQEIGKATAKYFFYSNIMNFFKTEITLANGEIRKRPLIETNGETGEIVWDKGRDFATVRKVLSMPQVNIVKKTEVQTGGFSKESILPKRNSDKLIARKKDWDPKKYGGFDSPTVAYSVLVVAKVEKGKSKKLKSVKELLGITIMERSSFEKNPIDFLEAKGYKEVKKDLIIKLPKYSLFELENGRKRMLASAGELQKGNELALPSKYVNFLYLASHYEKLKGSPEDNEQKQLFVEQHKHYLDEIIEQISEFSKRVILADANLDKVLSAYNKHRDKPIREQAENIIHLFTLTNLGAPAAFKYFDTTIDRKRYTSTKEVLDATLIHQSITGLYETRIDLSQLGGDGGGGGGSSEAAAKGGTLNIEDEHRLHETSKEPDVSLGSTWLSDFPQAWAETGGMGLAVRQAPLIIPLKATSTPVSIKQYPMSQEARLGIKPHIQRLLDQGILVPCQSPWNTPLLPVKKPGTNDYRPVQDLREVNKRVEDIHPTVPNPYNLLSGLPPSHQWYTVLDLKDAFFCLRLHPTSQPLFAFEWRDPEMGISGQLTWTRLPQGFKNSPTLFDEALHRDLADFRIQHPDLILLQYVDDLLLAATSELDCQQGTRALLQTLGNLGYRASAKKAQICQKQVKYLGYLLKEGQRWLTEARKETVMGQPTPKTPRQLREFLGTAGFCRLWIPGFAEMAAPLYPLTKTGTLFNWGPDQQKAYQEIKQALLTAPALGLPDLTKPFELFVDEKQGYAKGVLTQKLGPWRRPVAYLSKKLDPVAAGWPPCLRMVAAIAVLTKDAGKLTMGQPLVILAPHAVEALVKQPPDRWLSNARMTHYQALLLDTDRVQFGPVVALNPATLLPLPEEGLQHNCLDILAEAHGTRPDLTDQPLPDADHTWYTDGSSLLQEGQRKAGAAVTTETEVIWAKALPAGTSAQRAELIALTQALKMAEGKKLNVYTDSRYAFATAHIHGEIYRRRGLLTSEGKEIKNKDEILALLKALFLPKRLSIIHCPGHQKGHSAEARGNRMADQAARKAAITETPDTSTLLAGKRTADGSEFEKRTADGSEFESPKKKAKVE

SEQ ID NO: 7278 - protein, 2088 aa, synthetic construct
MPAAKRVKLDGGDKKYSIGLDIGTNSVGWAVITDEYKVPSKKFKVLGNTDRHSIKKNLIGALLFDSGETAEATRLKRTARRRYTRRKNRICYLQEIFSNEMAKVDDSFFHRLEESFLVEEDKKHERHPIFGNIVDEVAYHEKYPTIYHLRKKLVDSTDKADLRLIYLALAHMIKFRGHFLIEGDLNPDNSDVDKLFIQLVQTYNQLFEENPINASGVDAKAILSARLSKSRRLENLIAQLPGEKKNGLFGNLIALSLGLTPNFKSNFDLAEDAKLQLSKDTYDDDLDNLLAQIGDQYADLFLAAKNLSDAILLSDILRVNTEITKAPLSASMIKRYDEHHQDLTLLKALVRQQLPEKYKEIFFDQSKNGYAGYIDGGASQEEFYKFIKPILEKMDGTEELLVKLNREDLLRKQRTFDNGSIPHQIHLGELHAILRRQEDFYPFLKDNREKIEKILTFRIPYYVGPLARGNSRFAWMTRKSEETITPWNFEEVVDKGASAQSFIERMTNFDKNLPNEKVLPKHSLLYEYFTVYNELTKVKYVTEGMRKPAFLSGEQKKAIVDLLFKTNRKVTVKQLKEDYFKKIECFDSVEISGVEDRFNASLGTYHDLLKIIKDKDFLDNEENEDILEDIVLTLTLFEDREMIEERLKTYAHLFDDKVMKQLKRRRYTGWGRLSRKLINGIRDKQSGKTILDFLKSDGFANRNFMQLIHDDSLTFKEDIQKAQVSGQGDSLHEHIANLAGSPAIKKGILQTVKVVDELVKVMGRHKPENIVIEMARENQTTQKGQKNSRERMKRIEEGIKELGSQILKEHPVENTQLQNEKLYLYYLQNGRDMYVDQELDINRLSDYDVDHIVPQSFLKDDSIDNKVLTRSDKARGKSDNVPSEEVVKKMKNYWRQLLNAKLITQRKFDNLTKAERGGLSELDKAGFIKRQLVETRQITKHVAQILDSRMNTKYDENDKLIREVKVITLKSKLVSDFRKDFQFYKVREINNYHHAHDAYLNAVVGTALIKKYPKLESEFVYGDYKVYDVRKMIAKSEQEIGKATAKYFFYSNIMNFFKTEITLANGEIRKRPLIETNGETGEIVWDKGRDFATVRKVLSMPQVNIVKKTEVQTGGFSKESILPKRNSDKLIARKKDWDPKKYGGFDSPTVAYSVLVVAKVEKGKSKKLKSVKELLGITIMERSSFEKNPIDFLEAKGYKEVKKDLIIKLPKYSLFELENGRKRMLASAGELQKGNELALPSKYVNFLYLASHYEKLKGSPEDNEQKQLFVEQHKHYLDEIIEQISEFSKRVILADANLDKVLSAYNKHRDKPIREQAENIIHLFTLTNLGAPAAFKYFDTTIDRKRYTSTKEVLDATLIHQSITGLYETRIDLSQLGGDGGGGGGSSEAAAKGGLDDEYRLYSPLVKPDQNIQFWLEQFPQAWAETAGMGLAKQVPPQVIQLKASATPVSVRQYPLSKEAQEGIRPHVQRLIQQGILVPVQSPWNTPLLPVRKPGTNDYRPVQDLREVNKRVQDIHPTVPNPYNLLCALPPQRSWYTVLDLKDAFFCLRLHPTSQPLFAFEWRDPGTGRTGQLTWTRLPQGFKNSPTIFNEALHRDLANFRIQHPQVTLLQYVDDLLLAGATKQDCLEGTKALLLELSDLGYRASAKKAQICRREVTYLGYSLRDGQRWLTEARKKTVVQIPAPTTAKQVREFLGKAGFCRLFIPGFATLAAPLYPLTKPKGEFSWAPEHQKAFDAIKKALLSAPALALPDVTKPFTLYVDERKGVARGVLTQTLGPWRRPVAYLSKKLDPVASGWPVCLKAIAAVAILVKDADKLTLGQNITVIAPHALENIVRQPPDRWMTNARMTHYQSLLLTERVTFAPPAALNPATLLPEETDEPVTHDCHQLLIEETGVRKDLTDIPLTGEVLTWFTDGSSYVVEGKRMAGAAVVDGTRTIWASSLPEGTSAQKAELMALTQALRLAEGKSINIYTDSRYAFATAHVHGAIYKQRGWLTSAGREIKNKEEILSLLEALHLPKRLAIIHCPGHQKAKDPISRGNQMADRVAKQAAQGVNLLPAGKRTADGSEFEKRTADGSEFESPKKKAKVE

SEQ ID NO: 7279 - protein, 2088 aa, synthetic construct; identical to SEQ ID NO: 7278

SEQ ID NO: 7280 - protein, 2090 aa, synthetic construct
MPAAKRVKLDGGDKKYSIGLDIGTNSVGWAVITDEYKVPSKKFKVLGNTDRHSIKKNLIGALLFDSGETAEATRLKRTARRRYTRRKNRICYLQEIFSNEMAKVDDSFFHRLEESFLVEEDKKHERHPIFGNIVDEVAYHEKYPTIYHLRKKLVDSTDKADLRLIYLALAHMIKFRGHFLIEGDLNPDNSDVDKLFIQLVQTYNQLFEENPINASGVDAKAILSARLSKSRRLENLIAQLPGEKKNGLFGNLIALSLGLTPNFKSNFDLAEDAKLQLSKDTYDDDLDNLLAQIGDQYADLFLAAKNLSDAILLSDILRVNTEITKAPLSASMIKRYDEHHQDLTLLKALVRQQLPEKYKEIFFDQSKNGYAGYIDGGASQEEFYKFIKPILEKMDGTEELLVKLNREDLLRKQRTFDNGSIPHQIHLGELHAILRRQEDFYPFLKDNREKIEKILTFRIPYYVGPLARGNSRFAWMTRKSEETITPWNFEEVVDKGASAQSFIERMTNFDKNLPNEKVLPKHSLLYEYFTVYNELTKVKYVTEGMRKPAFLSGEQKKAIVDLLFKTNRKVTVKQLKEDYFKKIECFDSVEISGVEDRFNASLGTYHDLLKIIKDKDFLDNEENEDILEDIVLTLTLFEDREMIEERLKTYAHLFDDKVMKQLKRRRYTGWGRLSRKLINGIRDKQSGKTILDFLKSDGFANRNFMQLIHDDSLTFKEDIQKAQVSGQGDSLHEHIANLAGSPAIKKGILQTVKVVDELVKVMGRHKPENIVIEMARENQTTQKGQKNSRERMKRIEEGIKELGSQILKEHPVENTQLQNEKLYLYYLQNGRDMYVDQELDINRLSDYDVDHIVPQSFLKDDSIDNKVLTRSDKARGKSDNVPSEEVVKKMKNYWRQLLNAKLITQRKFDNLTKAERGGLSELDKAGFIKRQLVETRQITKHVAQILDSRMNTKYDENDKLIREVKVITLKSKLVSDFRKDFQFYKVREINNYHHAHDAYLNAVVGTALIKKYPKLESEFVYGDYKVYDVRKMIAKSEQEIGKATAKYFFYSNIMNFFKTEITLANGEIRKRPLIETNGETGEIVWDKGRDFATVRKVLSMPQVNIVKKTEVQTGGFSKESILPKRNSDKLIARKKDWDPKKYGGFDSPTVAYSVLVVAKVEKGKSKKLKSVKELLGITIMERSSFEKNPIDFLEAKGYKEVKKDLIIKLPKYSLFELENGRKRMLASAGELQKGNELALPSKYVNFLYLASHYEKLKGSPEDNEQKQLFVEQHKHYLDEIIEQISEFSKRVILADANLDKVLSAYNKHRDKPIREQAENIIHLFTLTNLGAPAAFKYFDTTIDRKRYTSTKEVLDATLIHQSITGLYETRIDLSQLGGDGGGGGGSSEAAAKGGTLQLDDEYRLYSPLVKPDQNIQFWLEQFPQAWAETAGMGLAKQVPPQVIQLKASATPVSVRQYPLSKEAQEGIRPHVQRLIQQGILVPVQSPWNTPLLPVRKPGTNDYRPVQDLREVNKRVQDIHPTVPNPYNLLCALPPQRSWYTVLDLKDAFFCLRLHPTSQPLFAFEWRDPGTGRTGQLTWTRLPQGFKNSPTIFDEALHRDLANFRIQHPQVTLLQYVDDLLLAGATKQDCLEGTKALLLELSDLGYRASAKKAQICRREVTYLGYSLRDGQRWLTEARKKTVVQIPAPTTAKQVREFLGTAGFCRLWIPGFATLAAPLYPLTKEKGEFSWAPEHQKAFDAIKKALLSAPALALPDVTKPFTLYVDERKGVARGVLTQTLGPWRRPVAYLSKKLDPVASGWPVCLKAIAAVAILVKDADKLTLGQNITVIAPHALENIVRQPPDRWMTNARMTHYQSLLLTERVTFAPPAALNPATLLPEETDEPVTHDCHQLLIEETGVRKDLTDIPLTGEVLTWFTDGSSYVVEGKRMAGAAVVDGTRTIWASSLPEGTSAQKAELMALTQALRLAEGKSINIYTDSRYAFATAHVHGAIYKQRGLLTSAGREIKNKEEILSLLEALHLPKRLAIIHCPGHQKAKDPISRGNQMADRVAKQAAQGVNLLAGKRTADGSEFEKRTADGSEFESPKKKAKVE

SEQ ID NO: 7281 - protein, 2094 aa, synthetic construct
MPAAKRVKLDGGDKKYSIGLDIGTNSVGWAVITDEYKVPSKKFKVLGNTDRHSIKKNLIGALLFDSGETAEATRLKRTARRRYTRRKNRICYLQEIFSNEMAKVDDSFFHRLEESFLVEEDKKHERHPIFGNIVDEVAYHEKYPTIYHLRKKLVDSTDKADLRLIYLALAHMIKFRGHFLIEGDLNPDNSDVDKLFIQLVQTYNQLFEENPINASGVDAKAILSARLSKSRRLENLIAQLPGEKKNGLFGNLIALSLGLTPNFKSNFDLAEDAKLQLSKDTYDDDLDNLLAQIGDQYADLFLAAKNLSDAILLSDILRVNTEITKAPLSASMIKRYDEHHQDLTLLKALVRQQLPEKYKEIFFDQSKNGYAGYIDGGASQEEFYKFIKPILEKMDGTEELLVKLNREDLLRKQRTFDNGSIPHQIHLGELHAILRRQEDFYPFLKDNREKIEKILTFRIPYYVGPLARGNSRFAWMTRKSEETITPWNFEEVVDKGASAQSFIERMTNFDKNLPNEKVLPKHSLLYEYFTVYNELTKVKYVTEGMRKPAFLSGEQKKAIVDLLFKTNRKVTVKQLKEDYFKKIECFDSVEISGVEDRFNASLGTYHDLLKIIKDKDFLDNEENEDILEDIVLTLTLFEDREMIEERLKTYAHLFDDKVMKQLKRRRYTGWGRLSRKLINGIRDKQSGKTILDFLKSDGFANRNFMQLIHDDSLTFKEDIQKAQVSGQGDSLHEHIANLAGSPAIKKGILQTVKVVDELVKVMGRHKPENIVIEMARENQTTQKGQKNSRERMKRIEEGIKELGSQILKEHPVENTQLQNEKLYLYYLQNGRDMYVDQELDINRLSDYDVDHIVPQSFLKDDSIDNKVLTRSDKARGKSDNVPSEEVVKKMKNYWRQLLNAKLITQRKFDNLTKAERGGLSELDKAGFIKRQLVETRQITKHVAQILDSRMNTKYDENDKLIREVKVITLKSKLVSDFRKDFQFYKVREINNYHHAHDAYLNAVVGTALIKKYPKLESEFVYGDYKVYDVRKMIAKSEQEIGKATAKYFFYSNIMNFFKTEITLANGEIRKRPLIETNGETGEIVWDKGRDFATVRKVLSMPQVNIVKKTEVQTGGFSKESILPKRNSDKLIARKKDWDPKKYGGFDSPTVAYSVLVVAKVEKGKSKKLKSVKELLGITIMERSSFEKNPIDFLEAKGYKEVKKDLIIKLPKYSLFELENGRKRMLASAGELQKGNELALPSKYVNFLYLASHYEKLKGSPEDNEQKQLFVEQHKHYLDEIIEQISEFSKRVILADANLDKVLSAYNKHRDKPIREQAENIIHLFTLTNLGAPAAFKYFDTTIDRKRYTSTKEVLDATLIHQSITGLYETRIDLSQLGGDGGGGGGSSEAAAKGGVLNLEEEYRLHEKPVPSSIDPSWLQLFPTVWAERAGMGLANQVPPVVVELRSGASPVAVRQYPMSKEAREGIRPHIQRFLDLGVLVPCQSPWNTPLLPVKKPGTNDYRPVQDLREINKRVQDIHPTVPNPYNLLSSLPPSHTWYSVLDLKDAFFCLKLHPNSQPLFAFEWRDPEKGNTGQLTWTRLPQGFKNSPTLFNEALHRDLAPFRALNPQVVLLQYVDDLLVAAPTYRDCKEGTQKLLQELSKLGYRVSAKKAQLCQKEVTYLGYLLKEGKRWLTPARKATVMKIPPPTTPRQVREFLGKAGFCRLFIPGFASLAAPLYPLTKPSIPFIWTEEHQKAFDRIKEALLSAPALALPDLTKPFTLYVDERAGVARGVLTQTLGPWRRPVAYLSKKLDPVASGWPTCLKAVAAVALLLKDADKLTLGQNVTVIASHSLESIVRQPPDRWMTNARMTHYQSLLLNERVSFAPPAVLNPATLLPVESEATPVHRCSEILAEETGTRRDLKDQPLPGVPAWYTDGSSFIAEGKRRAGAAIVDGKRTVWASSLPEGTSAQKAELVALTQALRLAEGKDINIYTDSRYAFATAHIHGAIYKQRGWLTSAGKDIKNKEEILALLEAIHLPKRVAIIHCPGHQKGNDPVATGNRRADEAAKQAALSTRVLAETTKPAGKRTADGSEFEKRTADGSEFESPKKKAKVE

SEQ ID NO: 7282 - protein, 2096 aa, synthetic construct
MPAAKRVKLDGGDKKYSIGLDIGTNSVGWAVITDEYKVPSKKFKVLGNTDRHSIKKNLIGALLFDSGETAEATRLKRTARRRYTRRKNRICYLQEIFSNEMAKVDDSFFHRLEESFLVEEDKKHERHPIFGNIVDEVAYHEKYPTIYHLRKKLVDSTDKADLRLIYLALAHMIKFRGHFLIEGDLNPDNSDVDKLFIQLVQTYNQLFEENPINASGVDAKAILSARLSKSRRLENLIAQLPGEKKNGLFGNLIALSLGLTPNFKSNFDLAEDAKLQLSKDTYDDDLDNLLAQIGDQYADLFLAAKNLSDAILLSDILRVNTEITKAPLSASMIKRYDEHHQDLTLLKALVRQQLPEKYKEIFFDQSKNGYAGYIDGGASQEEFYKFIKPILEKMDGTEELLVKLNREDLLRKQRTFDNGSIPHQIHLGELHAILRRQEDFYPFLKDNREKIEKILTFRIPYYVGPLARGNSRFAWMTRKSEETITPWNFEEVVDKGASAQSFIERMTNFDKNLPNEKVLPKHSLLYEYFTVYNELTKVKYVTEGMRKPAFLSGEQKKAIVDLLFKTNRKVTVKQLKEDYFKKIECFDSVEISGVEDRFNASLGTYHDLLKIIKDKDFLDNEENEDILEDIVLTLTLFEDREMIEERLKTYAHLFDDKVMKQLKRRRYTGWGRLSRKLINGIRDKQSGKTILDFLKSDGFANRNFMQLIHDDSLTFKEDIQKAQVSGQGDSLHEHIANLAGSPAIKKGILQTVKVVDELVKVMGRHKPENIVIEMARENQTTQKGQKNSRERMKRIEEGIKELGSQILKEHPVENTQLQNEKLYLYYLQNGRDMYVDQELDINRLSDYDVDHIVPQSFLKDDSIDNKVLTRSDKARGKSDNVPSEEVVKKMKNYWRQLLNAKLITQRKFDNLTKAERGGLSELDKAGFIKRQLVETRQITKHVAQILDSRMNTKYDENDKLIREVKVITLKSKLVSDFRKDFQFYKVREINNYHHAHDAYLNAVVGTALIKKYPKLESEFVYGDYKVYDVRKMIAKSEQEIGKATAKYFFYSNIMNFFKTEITLANGEIRKRPLIETNGETGEIVWDKGRDFATVRKVLSMPQVNIVKKTEVQTGGFSKESILPKRNSDKLIARKKDWDPKKYGGFDSPTVAYSVLVVAKVEKGKSKKLKSVKELLGITIMERSSFEKNPIDFLEAKGYKEVKKDLIIKLPKYSLFELENGRKRMLASAGELQKGNELALPSKYVNFLYLASHYEKLKGSPEDNEQKQLFVEQHKHYLDEIIEQISEFSKRVILADANLDKVLSAYNKHRDKPIREQAENIIHLFTLTNLGAPAAFKYFDTTIDRKRYTSTKEVLDATLIHQSITGLYETRIDLSQLGGDGGGGGGSSEAAAKGGTLNIEDEYRLHETSKEPDVPLGSTWLSDFPQAWAETGGMGLAVRQAPLIIPLKATSTPVSIKQYPMSQEARLGIKPHIQRLLDQGILVPCQSPWNTPLLPVKKPGTNDYRPVQDLREVNKRVEDIHPTVPNPYNLLSGLPPSHQWYTVLDLKDAFFCLRLHPTSQPLFAFEWRDPEMGISGQLTWTRLPQGFKNSPTLFNEALHRDLADFRIQHPDLILLQYVDDLLLAATSEQDCQRGTRALLQTLGNLGYRASAKKAQICQKQVKYLGYLLKEGQRWLTEARKETVMGQPTPKTPRQLREFLGTAGFCRLWIPGFAEMAAPLYPLTKPGTLFNWGPDQQKAYQEIKQALLTAPALGLPDLTKPFELFVDEKQGYAKGVLTQKLGPWRRPVAYLSKKLDPVAAGWPPCLRMVAAIAVLTKDAGKLTMGQPLVILAPHAVEALVKQPPDRWLSNARMTHYQAMLLDTDRVQFGPVVALNPATLLPLPEKEAPHDCLEILAETHGTRPDLTDQPIPDADYTWYTDGSSFLQEGQRRAGAAVTTETEVIWARALPAGTSAQRAELIALTQALKMAEGKKLNVYTDSRYAFATAHVHGEIYRRRGWLTSEGREIKNKNEILALLKALFLPKRLSIIHCPGHQKGNSAEARGNRMADQAAREAAMKAVLETSTLLAGKRTADGSEFEKRTADGSEFESPKKKAKVE

SEQ ID NO: 7283 - protein, 2173 aa, synthetic construct
MPAAKRVKLDGGDKKYSIGLDIGTNSVGWAVITDEYKVPSKKFKVLGNTDRHSIKKNLIGALLFDSGETAEATRLKRTARRRYTRRKNRICYLQEIFSNEMAKVDDSFFHRLEESFLVEEDKKHERHPIFGNIVDEVAYHEKYPTIYHLRKKLVDSTDKADLRLIYLALAHMIKFRGHFLIEGDLNPDNSDVDKLFIQLVQTYNQLFEENPINASGVDAKAILSARLSKSRRLENLIAQLPGEKKNGLFGNLIALSLGLTPNFKSNFDLAEDAKLQLSKDTYDDDLDNLLAQIGDQYADLFLAAKNLSDAILLSDILRVNTEITKAPLSASMIKRYDEHHQDLTLLKALVRQQLPEKYKEIFFDQSKNGYAGYIDGGASQEEFYKFIKPILEKMDGTEELLVKLNREDLLRKQRTFDNGSIPHQIHLGELHAILRRQEDFYPFLKDNREKIEKILTFRIPYYVGPLARGNSRFAWMTRKSEETITPWNFEEVVDKGASAQSFIERMTNFDKNLPNEKVLPKHSLLYEYFTVYNELTKVKYVTEGMRKPAFLSGEQKKAIVDLLFKTNRKVTVKQLKEDYFKKIECFDSVEISGVEDRFNASLGTYHDLLKIIKDKDFLDNEENEDILEDIVLTLTLFEDREMIEERLKTYAHLFDDKVMKQLKRRRYTGWGRLSRKLINGIRDKQSGKTILDFLKSDGFANRNFMQLIHDDSLTFKEDIQKAQVSGQGDSLHEHIANLAGSPAIKKGILQTVKVVDELVKVMGRHKPENIVIEMARENQTTQKGQKNSRERMKRIEEGIKELGSQILKEHPVENTQLQNEKLYLYYLQNGRDMYVDQELDINRLSDYDVDHIVPQSFLKDDSIDNKVLTRSDKARGKSDNVPSEEVVKKMKNYWRQLLNAKLITQRKFDNLTKAERGGLSELDKAGFIKRQLVETRQITKHVAQILDSRMNTKYDENDKLIREVKVITLKSKLVSDFRKDFQFYKVREINNYHHAHDAYLNAVVGTALIKKYPKLESEFVYGDYKVYDVRKMIAKSEQEIGKATAKYFFYSNIMNFFKTEITLANGEIRKRPLIETNGETGEIVWDKGRDFATVRKVLSMPQVNIVKKTEVQTGGFSKESILPKRNSDKLIARKKDWDPKKYGGFDSPTVAYSVLVVAKVEKGKSKKLKSVKELLGITIMERSSFEKNPIDFLEAKGYKEVKKDLIIKLPKYSLFELENGRKRMLASAGELQKGNELALPSKYVNFLYLASHYEKLKGSPEDNEQKQLFVEQHKHYLDEIIEQISEFSKRVILADANLDKVLSAYNKHRDKPIREQAENIIHLFTLTNLGAPAAFKYFDTTIDRKRYTSTKEVLDATLIHQSITGLYETRIDLSQLGGDGGGGGEAAAKGSSGGMDLLKPLTVERKGVKIKGYWNSQADITCVPKDLLQGEEPVRQQNVTTIHGTQEGDVYYVNLKIDGRRINTEVIGTTLDYAIITPGDVPWILKKPLELTIKLDLEEQQGTLLNNSILSKKGKEELKQLFEKYSALWQSWENQVGHRRIRPHKIATGTVKPTPQKQYHINPKAKPDIQIVINDLLKQGVLIQKESTMNTPVYPVPKPNGRWRMVLDYRAVNKVTPLIAVQNQHSYGILGSLFKGRYKTTIDLSNGFWAHPIVPEDYWITAFTWQGKQYCWTVLPQGFLNSPGLFNGDVVDLLQGIPNVEVYVDDVYISHDSEKEHLEYLDILFNRLKEAGYIISLKKSNIANSIVDFLGFQITNEGRGLTDTFKEKLENITAPTTLKQLQSILGKLNFARNFIPDFTELIAPLYALIPKSPKNYVPWQIEHSTTLETLITKLNGAEYLQGRKGDKTLIMKVNASYTTGYIRYYNEGEKKPISYVSIVFSKTELKFTELEKLLTTVHKGLLKALDLSMGQNIHVYSPIVSMQNIQKTPQTAKKALASRWLSWLSYLEDPRIRFFYDPQMPALKDLPAVDTGKDNKKHPSNFQHIFYTDGSAITSPTKEGHLNAGMGIVYFINKDGNLQKQQEWSISLGNHTAQFAEIAAFEFALKKCLPLGGNILVVTDSNYVAKAYNEELDVWASNGFVNNRKKPLKHISKWKSVADLKRLRPDVVVTHEPGHQKLDSSPHAYGNNLADQLATQASFKVHAGKRTADGSEFEKRTADGSEFESPKKKAKVE

SEQ ID NO: 7284 - protein, 2095 aa, synthetic construct
MPAAKRVKLDGGDKKYSIGLDIGTNSVGWAVITDEYKVPSKKFKVLGNTDRHSIKKNLIGALLFDSGETAEATRLKRTARRRYTRRKNRICYLQEIFSNEMAKVDDSFFHRLEESFLVEEDKKHERHPIFGNIVDEVAYHEKYPTIYHLRKKLVDSTDKADLRLIYLALAHMIKFRGHFLIEGDLNPDNSDVDKLFIQLVQTYNQLFEENPINASGVDAKAILSARLSKSRRLENLIAQLPGEKKNGLFGNLIALSLGLTPNFKSNFDLAEDAKLQLSKDTYDDDLDNLLAQIGDQYADLFLAAKNLSDAILLSDILRVNTEITKAPLSASMIKRYDEHHQDLTLLKALVRQQLPEKYKEIFFDQSKNGYAGYIDGGASQEEFYKFIKPILEKMDGTEELLVKLNREDLLRKQRTFDNGSIPHQIHLGELHAILRRQEDFYPFLKDNREKIEKILTFRIPYYVGPLARGNSRFAWMTRKSEETITPWNFEEVVDKGASAQSFIERMTNFDKNLPNEKVLPKHSLLYEYFTVYNELTKVKYVTEGMRKPAFLSGEQKKAIVDLLFKTNRKVTVKQLKEDYFKKIECFDSVEISGVEDRFNASLGTYHDLLKIIKDKDFLDNEENEDILEDIVLTLTLFEDREMIEERLKTYAHLFDDKVMKQLKRRRYTGWGRLSRKLINGIRDKQSGKTILDFLKSDGFANRNFMQLIHDDSLTFKEDIQKAQVSGQGDSLHEHIANLAGSPAIKKGILQTVKVVDELVKVMGRHKPENIVIEMARENQTTQKGQKNSRERMKRIEEGIKELGSQILKEHPVENTQLQNEKLYLYYLQNGRDMYVDQELDINRLSDYDVDHIVPQSFLKDDSIDNKVLTRSDKARGKSDNVPSEEVVKKMKNYWRQLLNAKLITQRKFDNLTKAERGGLSELDKAGFIKRQLVETRQITKHVAQILDSRMNTKYDENDKLIREVKVITLKSKLVSDFRKDFQFYKVREINNYHHAHDAYLNAVVGTALIKKYPKLESEFVYGDYKVYDVRKMIAKSEQEIGKATAKYFFYSNIMNFFKTEITLANGEIRKRPLIETNGETGEIVWDKGRDFATVRKVLSMPQVNIVKKTEVQTGGFSKESILPKRNSDKLIARKKDWDPKKYGGFDSPTVAYSVLVVAKVEKGKSKKLKSVKELLGITIMERSSFEKNPIDFLEAKGYKEVKKDLIIKLPKYSLFELENGRKRMLASAGELQKGNELALPSKYVNFLYLASHYEKLKGSPEDNEQKQLFVEQHKHYLDEIIEQISEFSKRVILADANLDKVLSAYNKHRDKPIREQAENIIHLFTLTNLGAPAAFKYFDTTIDRKRYTSTKEVLDATLIHQSITGLYETRIDLSQLGGDGGGGGEAAAKGSSGGTLQLEEEYRLFEPESTQKQEMDIWLKNFPQAWAETGGMGTAHCQAPVLIQLKATATPISIRQYPMPHEAYQGIKPHIRRMLDQGILKPCQSPWNTPLLPVKKPGTEDYRPVQDLREVNKRVEDIHPTVPNPYNLLSTLPPSHPWYTVLDLKDAFFCLRLHSESQLLFAFEWRDPEIGLSGQLTWTRLPQGFKNSPTLFNEALHSDLADFRVRYPALVLLQYVDDLLLAAATRTECLEGTKALLETLGNKGYRASAKKAQICLQEVTYLGYSLKDGQRWLTKARKEAILSIPVPKNSRQVREFLGKAGYCRLFIPGFAELAAPLYPLTRPGTLFQWGTEQQLAFEDIKKALLSSPALGLPDITKPFELFIDENSGFAKGVLVQKLGPWKRPVAYLSKKLDTVASGWPPCLRMVAAIAILVKDAGKLTLGQPLTILTSHPVEALVRQPPNKWLSNARMTHYQAMLLDAERVHFGPTVSLNPATLLPLPSGGNHHDCLQILAETHGTRPDLTDQPLPDADLTWYTDGSSFIRNGEREAGAAVTTESEVIWAAPLPPGTSAQRAELIALTQALKMAEGKKLTVYTDSRYAFATTHVHGEIYRRRGWLTSEGKEIKNKNEILALLEALFLPKRLSIIHCPGHQKGDSPQAKGNRLADDTAKKAATETHSSLTVLPAGKRTADGSEFEKRTADGSEFESPKKKAKVE

SEQ ID NO: 7285 - protein, 2176 aa, synthetic construct
MPAAKRVKLDGGDKKYSIGLDIGTNSVGWAVITDEYKVPSKKFKVLGNTDRHSIKKNLIGALLFDSGETAEATRLKRTARRRYTRRKNRICYLQEIFSNEMAKVDDSFFHRLEESFLVEEDKKHERHPIFGNIVDEVAYHEKYPTIYHLRKKLVDSTDKADLRLIYLALAHMIKFRGHFLIEGDLNPDNSDVDKLFIQLVQTYNQLFEENPINASGVDAKAILSARLSKSRRLENLIAQLPGEKKNGLFGNLIALSLGLTPNFKSNFDLAEDAKLQLSKDTYDDDLDNLLAQIGDQYADLFLAAKNLSDAILLSDILRVNTEITKAPLSASMIKRYDEHHQDLTLLKALVRQQLPEKYKEIFFDQSKNGYAGYIDGGASQEEFYKFIKPILEKMDGTEELLVKLNREDLLRKQRTFDNGSIPHQIHLGELHAILRRQEDFYPFLKDNREKIEKILTFRIPYYVGPLARGNSRFAWMTRKSEETITPWNFEEVVDKGASAQSFIERMTNFDKNLPNEKVLPKHSLLYEYFTVYNELTKVKYVTEGMRKPAFLSGEQKKAIVDLLFKTNRKVTVKQLKEDYFKKIECFDSVEISGVEDRFNASLGTYHDLLKIIKDKDFLDNEENEDILEDIVLTLTLFEDREMIEERLKTYAHLFDDKVMKQLKRRRYTGWGRLSRKLINGIRDKQSGKTILDFLKSDGFANRNFMQLIHDDSLTFKEDIQKAQVSGQGDSLHEHIANLAGSPAIKKGILQTVKVVDELVKVMGRHKPENIVIEMARENQTTQKGQKNSRERMKRIEEGIKELGSQILKEHPVENTQLQNEKLYLYYLQNGRDMYVDQELDINRLSDYDVDHIVPQSFLKDDSIDNKVLTRSDKARGKSDNVPSEEVVKKMKNYWRQLLNAKLITQRKFDNLTKAERGGLSELDKAGFIKRQLVETRQITKHVAQILDSRMNTKYDENDKLIREVKVITLKSKLVSDFRKDFQFYKVREINNYHHAHDAYLNAVVGTALIKKYPKLESEFVYGDYKVYDVRKMIAKSEQEIGKATAKYFFYSNIMNFFKTEITLANGEIRKRPLIETNGETGEIVWDKGRDFATVRKVLSMPQVNIVKKTEVQTGGFSKESILPKRNSDKLIARKKDWDPKKYGGFDSPTVAYSVLVVAKVEKGKSKKLKSVKELLGITIMERSSFEKNPIDFLEAKGYKEVKKDLIIKLPKYSLFELENGRKRMLASAGELQKGNELALPSKYVNFLYLASHYEKLKGSPEDNEQKQLFVEQHKHYLDEIIEQISEFSKRVILADANLDKVLSAYNKHRDKPIREQAENIIHLFTLTNLGAPAAFKYFDTTIDRKRYTSTKEVLDATLIHQSITGLYETRIDLSQLGGDGGGGGEAAAKGSSGGMNPLQLLQPLPAEIKGTKLLAHWNSGATITCIPESFLEDEQPIKKTLIKTIHGEKQQNVYYVTFKVKGRKVEAEVIASPYEYILLSPTDVPWLTQQPLQLTILVPLQEYQEKILSKTALPEDQKQQLKTLFVKYDNLWQHWENQVGHRKIRPHNIATGDYPPRPQKQYPINPKAKPSIQIVIDDLLKQGVLTPQNSTMNTPVYPVPKPDGRWRMVLDYREVNKTIPLTAAQNQHSAGILATIVRQKYKTTLDLANGFWAHPITPESYWLTAFTWQGKQYCWTRLPQGFLNSPALFTADVVDLLKEIPNVQVYVDDIYLSHDDPKEHVQQLEKVFQILLQAGYVVSLKKSEIGQKTVEFLGFNITKEGRGLTDTFKTKLLNITPPKDLKQLQSILGLLNFARNFIPNFAELVQPLYNLIASAKGKYIEWSEENTKQLNMVIEALNTASNLEERLPEQRLVIKVNTSPSAGYVRYYNETGKKPIMYLNYVFSKAELKFSMLEKLLTTMHKALIKAMDLAMGQEILVYSPIVSMTKIQKTPLPERKALPIRWITWMTYLEDPRIQFHYDKTLPELKHIPDVYTSSQSPVKHPSQYEGVFYTDGSAIKSPDPTKSNNAGMGIVHATYKPEYQVLNQWSIPLGNHTAQMAEIAAVEFACKKALKIPGPVLVITDSFYVAESANKELPYWKSNGFVNNKKKPLKHISKWKSIAECLSMKPDITIQHEKGISLQIPVFILKGNALADKLATQGSYVVNAGKRTADGSEFEKRTADGSEFESPKKKAKVE

SEQ ID NO: 7286 - protein, 2127 aa, synthetic construct
MPAAKRVKLDGGDKKYSIGLDIGTNSVGWAVITDEYKVPSKKFKVLGNTDRHSIKKNLIGALLFDSGETAEATRLKRTARRRYTRRKNRICYLQEIFSNEMAKVDDSFFHRLEESFLVEEDKKHERHPIFGNIVDEVAYHEKYPTIYHLRKKLVDSTDKADLRLIYLALAHMIKFRGHFLIEGDLNPDNSDVDKLFIQLVQTYNQLFEENPINASGVDAKAILSARLSKSRRLENLIAQLPGEKKNGLFGNLIALSLGLTPNFKSNFDLAEDAKLQLSKDTYDDDLDNLLAQIGDQYADLFLAAKNLSDAILLSDILRVNTEITKAPLSASMIKRYDEHHQDLTLLKALVRQQLPEKYKEIFFDQSKNGYAGYIDGGASQEEFYKFIKPILEKMDGTEELLVKLNREDLLRKQRTFDNGSIPHQIHLGELHAILRRQEDFYPFLKDNREKIEKILTFRIPYYVGPLARGNSRFAWMTRKSEETITPWNFEEVVDKGASAQSFIERMTNFDKNLPNEKVLPKHSLLYEYFTVYNELTKVKYVTEGMRKPAFLSGEQKKAIVDLLFKTNRKVTVKQLKEDYFKKIECFDSVEISGVEDRFNASLGTYHDLLKIIKDKDFLDNEENEDILEDIVLTLTLFEDREMIEERLKTYAHLFDDKVMKQLKRRRYTGWGRLSRKLINGIRDKQSGKTILDFLKSDGFANRNFMQLIHDDSLTFKEDIQKAQVSGQGDSLHEHIANLAGSPAIKKGILQTVKVVDELVKVMGRHKPENIVIEMARENQTTQKGQKNSRERMKRIEEGIKELGSQILKEHPVENTQLQNEKLYLYYLQNGRDMYVDQELDINRLSDYDVDHIVPQSFLKDDSIDNKVLTRSDKARGKSDNVPSEEVVKKMKNYWRQLLNAKLITQRKFDNLTKAERGGLSELDKAGFIKRQLVETRQITKHVAQILDSRMNTKYDENDKLIREVKVITLKSKLVSDFRKDFQFYKVREINNYHHAHDAYLNAVVGTALIKKYPKLESEFVYGDYKVYDVRKMIAKSEQEIGKATAKYFFYSNIMNFFKTEITLANGEIRKRPLIETNGETGEIVWDKGRDFATVRKVLSMPQVNIVKKTEVQTGGFSKESILPKRNSDKLIARKKDWDPKKYGGFDSPTVAYSVLVVAKVEKGKSKKLKSVKELLGITIMERSSFEKNPIDFLEAKGYKEVKKDLIIKLPKYSLFELENGRKRMLASAGELQKGNELALPSKYVNFLYLASHYEKLKGSPEDNEQKQLFVEQHKHYLDEIIEQISEFSKRVILADANLDKVLSAYNKHRDKPIREQAENIIHLFTLTNLGAPAAFKYFDTTIDRKRYTSTKEVLDATLIHQSITGLYETRIDLSQLGGDGGGGGEAAAKGSSGGLLGRDLLTKLKAQIQFSTEGPQVTWEDRPAMCLVLNLEEEYRLHEKPVPPSIDPSWLQLFPMVWAEKAGMGLANQVPPVVVELKSDASPVAVRQYPMSKEAREGIRPHIQRFLDLGILVPCQSPWNTPLLPVKKPGTNDYRPVQDLREVNKRVQDIHPTVPNPYNLLSSLPPSHTWYSVLDLKDAFFCLKLHPNSQPLFAFEWRDPEKGNTGQLTWTRLPQGFKNSPTLFNEALHRDLASFRALNPQVVMLQYVDDLLVAAPTYRDCKEGTRRLLQELSKLGYRVSAKKAQLCREEVTYLGYLLKGGKRWLTPARKATVMKIPTPTTPRQVREFLGTAGFCRLWIPGFASLAAPLYPLTRPKVPFTWTEAHQEAFGRIKEALLSAPALALPDLTKPFALYVDEKEGVARGVLTQTLGPWRRPVAYLSKKLDPVASGWPTCLKAIAAVALLLKDADKLTLGQNVLVIAPHNLESIVRQPPDRWMTNARMTHYQSLLLNERVSFAPPAILNPATLLPVESDDTPIHICSEILAEETGTRPDLRDQPLPGVPAWYTDGSSFIMDGRRQAGAAIVDNKRTVWASNLPEGTSAQKAELIALTQALRLAEGKSINIYTDSRYAFATAHVHGAIYKQRGWLTSAGKDIKNKEEILALLEAIHLPKRVAIIHCPGHQRGTDPVATGNRKADEAAKQAAQSTRILTETTKNAGKRTADGSEFEKRTADGSEFESPKKKAKVE

SEQ ID NO: 7287 - protein, 2218 aa, synthetic construct
MPAAKRVKLDGGDKKYSIGLDIGTNSVGWAVITDEYKVPSKKFKVLGNTDRHSIKKNLIGALLFDSGETAEATRLKRTARRRYTRRKNRICYLQEIFSNEMAKVDDSFFHRLEESFLVEEDKKHERHPIFGNIVDEVAYHEKYPTIYHLRKKLVDSTDKADLRLIYLALAHMIKFRGHFLIEGDLNPDNSDVDKLFIQLVQTYNQLFEENPINASGVDAKAILSARLSKSRRLENLIAQLPGEKKNGLFGNLIALSLGLTPNFKSNFDLAEDAKLQLSKDTYDDDLDNLLAQIGDQYADLFLAAKNLSDAILLSDILRVNTEITKAPLSASMIKRYDEHHQDLTLLKALVRQQLPEKYKEIFFDQSKNGYAGYIDGGASQEEFYKFIKPILEKMDGTEELLVKLNREDLLRKQRTFDNGSIPHQIHLGELHAILRRQEDFYPFLKDNREKIEKILTFRIPYYVGPLARGNSRFAWMTRKSEETITPWNFEEVVDKGASAQSFIERMTNFDKNLPNEKVLPKHSLLYEYFTVYNELTKVKYVTEGMRKPAFLSGEQKKAIVDLLFKTNRKVTVKQLKEDYFKKIECFDSVEISGVEDRFNASLGTYHDLLKIIKDKDFLDNEENEDILEDIVLTLTLFEDREMIEERLKTYAHLFDDKVMKQLKRRRYTGWGRLSRKLINGIRDKQSGKTILDFLKSDGFANRNFMQLIHDDSLTFKEDIQKAQVSGQGDSLHEHIANLAGSPAIKKGILQTVKVVDELVKVMGRHKPENIVIEMARENQTTQKGQKNSRERMKRIEEGIKELGSQILKEHPVENTQLQNEKLYLYYLQNGRDMYVDQELDINRLSDYDVDHIVPQSFLKDDSIDNKVLTRSDKARGKSDNVPSEEVVKKMKNYWRQLLNAKLITQRKFDNLTKAERGGLSELDKAGFIKRQLVETRQITKHVAQILDSRMNTKYDENDKLIREVKVITLKSKLVSDFRKDFQFYKVREINNYHHAHDAYLNAVVGTALIKKYPKLESEFVYGDYKVYDVRKMIAKSEQEIGKATAKYFFYSNIMNFFKTEITLANGEIRKRPLIETNGETGEIVWDKGRDFATVRKVLSMPQVNIVKKTEVQTGGFSKESILPKRNSDKLIARKKDWDPKKYGGFDSPTVAYSVLVVAKVEKGKSKKLKSVKELLGITIMERSSFEKNPIDFLEAKGYKEVKKDLIIKLPKYSLFELENGRKRMLASAGELQKGNELALPSKYVNFLYLASHYEKLKGSPEDNEQKQLFVEQHKHYLDEIIEQISEFSKRVILADANLDKVLSAYNKHRDKPIREQAENIIHLFTLTNLGAPAAFKYFDTTIDRKRYTSTKEVLDATLIHQSITGLYETRIDLSQLGGDGGGGGEAAAKGSSGGTLGDQGSRGSDPLPEPRVTLTVEGIPTEFLVNTGAEHSVLTKPMGKMGSKRTVVAGATGSKVYPWTTKRLLKIGQKQVTHSFLVIPECPAPLLGRDLLTKLKAQIQFSTEGPQVTWEDRPAMCLVLNLEEEYRLHEKPVPPSIDPSWLQLFPMVWAEKAGMGLANQVPPVVVELKSDASPVAVRQYPMSKEAREGIRPHIQRFLDLGILVPCQSPWNTPLLPVKKPGTNDYRPVQDLREVNKRVQDIHPTVPNPYNLLSSLPPSHTWYSVLDLKDAFFCLKLHPNSQPLFAFEWRDPEKGNTGQLTWTRLPQGFKNSPTLFNEALHRDLASFRALNPQVVMLQYVDDLLVAAPTYRDCKEGTRRLLQELSKLGYRVSAKKAQLCREEVTYLGYLLKGGKRWLTPARKATVMKIPTPTTPRQVREFLGTAGFCRLWIPGFASLAAPLYPLTRPKVPFTWTEAHQEAFGRIKEALLSAPALALPDLTKPFALYVDEKEGVARGVLTQTLGPWRRPVAYLSKKLDPVASGWPTCLKAIAAVALLLKDADKLTLGQNVLVIAPHNLESIVRQPPDRWMTNARMTHYQSLLLNERVSFAPPAILNPATLLPVESDDTPIHICSEILAEETGTRPDLRDQPLPGVPAWYTDGSSFIMDGRRQAGAAIVDNKRTVWASNLPEGTSAQKAELIALTQALRLAEGKSINIYTDSRYAFATAHVHGAIYKQRGWLTSAGKDIKNKEEILALLEAIHLPKRVAIIHCPGHQRGTDPVATGNRKADEAAKQAAQSTRILTETTKNAGKRTADGSEFEKRTADGSEFESPKKKAKVE

SEQ ID NO: 7288 - protein, 2096 aa, synthetic construct
MPAAKRVKLDGGDKKYSIGLDIGTNSVGWAVITDEYKVPSKKFKVLGNTDRHSIKKNLIGALLFDSGETAEATRLKRTARRRYTRRKNRICYLQEIFSNEMAKVDDSFFHRLEESFLVEEDKKHERHPIFGNIVDEVAYHEKYPTIYHLRKKLVDSTDKADLRLIYLALAHMIKFRGHFLIEGDLNPDNSDVDKLFIQLVQTYNQLFEENPINASGVDAKAILSARLSKSRRLENLIAQLPGEKKNGLFGNLIALSLGLTPNFKSNFDLAEDAKLQLSKDTYDDDLDNLLAQIGDQYADLFLAAKNLSDAILLSDILRVNTEITKAPLSASMIKRYDEHHQDLTLLKALVRQQLPEKYKEIFFDQSKNGYAGYIDGGASQEEFYKFIKPILEKMDGTEELLVKLNREDLLRKQRTFDNGSIPHQIHLGELHAILRRQEDFYPFLKDNREKIEKILTFRIPYYVGPLARGNSRFAWMTRKSEETITPWNFEEVVDKGASAQSFIERMTNFDKNLPNEKVLPKHSLLYEYFTVYNELTKVKYVTEGMRKPAFLSGEQKKAIVDLLFKTNRKVTVKQLKEDYFKKIECFDSVEISGVEDRFNASLGTYHDLLKIIKDKDFLDNEENEDILEDIVLTLTLFEDREMIEERLKTYAHLFDDKVMKQLKRRRYTGWGRLSRKLINGIRDKQSGKTILDFLKSDGFANRNFMQLIHDDSLTFKEDIQKAQVSGQGDSLHEHIANLAGSPAIKKGILQTVKVVDELVKVMGRHKPENIVIEMARENQTTQKGQKNSRERMKRIEEGIKELGSQILKEHPVENTQLQNEKLYLYYLQNGRDMYVDQELDINRLSDYDVDHIVPQSFLKDDSIDNKVLTRSDKARGKSDNVPSEEVVKKMKNYWRQLLNAKLITQRKFDNLTKAERGGLSELDKAGFIKRQLVETRQITKHVAQILDSRMNTKYDENDKLIREVKVITLKSKLVSDFRKDFQFYKVREINNYHHAHDAYLNAVVGTALIKKYPKLESEFVYGDYKVYDVRKMIAKSEQEIGKATAKYFFYSNIMNFFKTEITLANGEIRKRPLIETNGETGEIVWDKGRDFATVRKVLSMPQVNIVKKTEVQTGGFSKESILPKRNSDKLIARKKDWDPKKYGGFDSPTVAYSVLVVAKVEKGKSKKLKSVKELLGITIMERSSFEKNPIDFLEAKGYKEVKKDLIIKLPKYSLFELENGRKRMLASAGELQKGNELALPSKYVNFLYLASHYEKLKGSPEDNEQKQLFVEQHKHYLDEIIEQISEFSKRVILADANLDKVLSAYNKHRDKPIREQAENIIHLFTLTNLGAPAAFKYFDTTIDRKRYTSTKEVLDATLIHQSITGLYETRIDLSQLGGDGGGGGEAAAKGSSGGTLNLEDEYRLYETSAEPEVSPGSTWLSDFPQAWAETGGMGLAVRQAPLIIPLKATSTPVSIKQYPMSQEAKLGIKPHIQRLLDQGILVPCQSPWNTPLLPVKKPGTNDYRPVQDLREVNKRVEDIHPTVPNPYNLLSGLPPSHRWYTVLDLKDAFFCLRLHPTSQPLFAFEWRDPGMGISGQLTWTRLPQGFKNSPTLFNEALHRDLADFRIQHPDLILLQYVDDILLAATSELDCQQGTRALLLTLGNLGYRASAKKAQLCQKQVKYLGYLLKEGQRWLTEARKETVMGQPTPKTPRQLREFLGTAGFCRLWIPGFAEMAAPLYPLTKPGTLFNWGPDQQKAYQEIKQALLTAPALGLPDLTKPFELFVDEKQGYAKGVLTQKLGPWRRPVAYLSKKLDPVAAGWPPCLRMVAAIAVLRKDAGKLTMGQPLVILAPHAVEALVKQPPDRWLSNARMTHYQAMLLDTDRVQFGPVVALNPATLLPLPEEGAPHDCLEILAETHGTRPDLTDQPIPDADHTWYTDGSSFLQEGQRKAGAAVTTETEVIWARALPAGTSAQRAELIALTQALKMAEGKRLNVYTDSRYAFATAHIHGEIYRRRGWLTSEGREIKNKSEILALLKALFLPKRLSIIHCLGHQKGDSAEARGNRLADQAAREAAIKTPPDTSTLLAGKRTADGSEFEKRTADGSEFESPKKKAKVE

SEQ ID NO: 7289 - protein, 2096 aa, synthetic construct
MPAAKRVKLDGGDKKYSIGLDIGTNSVGWAVITDEYKVPSKKFKVLGNTDRHSIKKNLIGALLFDSGETAEATRLKRTARRRYTRRKNRICYLQEIFSNEMAKVDDSFFHRLEESFLVEEDKKHERHPIFGNIVDEVAYHEKYPTIYHLRKKLVDSTDKADLRLIYLALAHMIKFRGHFLIEGDLNPDNSDVDKLFIQLVQTYNQLFEENPINASGVDAKAILSARLSKSRRLENLIAQLPGEKKNGLFGNLIALSLGLTPNFKSNFDLAEDAKLQLSKDTYDDDLDNLLAQIGDQYADLFLAAKNLSDAILLSDILRVNTEITKAPLSASMIKRYDEHHQDLTLLKALVRQQLPEKYKEIFFDQSKNGYAGYIDGGASQEEFYKFIKPILEKMDGTEELLVKLNREDLLRKQRTFDNGSIPHQIHLGELHAILRRQEDFYPFLKDNREKIEKILTFRIPYYVGPLARGNSRFAWMTRKSEETITPWNFEEVVDKGASAQSFIERMTNFDKNLPNEKVLPKHSLLYEYFTVYNELTKVKYVTEGMRKPAFLSGEQKKAIVDLLFKTNRKVTVKQLKEDYFKKIECFDSVEISGVEDRFNASLGTYHDLLKIIKDKDFLDNEENEDILEDIVLTLTLFEDREMIEERLKTYAHLFDDKVMKQLKRRRYTGWGRLSRKLINGIRDKQSGKTILDFLKSDGFANRNFMQLIHDDSLTFKEDIQKAQVSGQGDSLHEHIANLAGSPAIKKGILQTVKVVDELVKVMGRHKPENIVIEMARENQTTQKGQKNSRERMKRIEEGIKELGSQILKEHPVENTQLQNEKLYLYYLQNGRDMYVDQELDINRLSDYDVDHIVPQSFLKDDSIDNKVLTRSDKARGKSDNVPSEEVVKKMKNYWRQLLNAKLITQRKFDNLTKAERGGLSELDKAGFIKRQLVETRQITKHVAQILDSRMNTKYDENDKLIREVKVITLKSKLVSDFRKDFQFYKVREINNYHHAHDAYLNAVVGTALIKKYPKLESEFVYGDYKVYDVRKMIAKSEQEIGKATAKYFFYSNIMNFFKTEITLANGEIRKRPLIETNGETGEIVWDKGRDFATVRKVLSMPQVNIVKKTEVQTGGFSKESILPKRNSDKLIARKKDWDPKKYGGFDSPTVAYSVLVVAKVEKGKSKKLKSVKELLGITIMERSSFEKNPIDFLEAKGYKEVKKDLIIKLPKYSLFELENGRKRMLASAGELQKGNELALPSKYVNFLYLASHYEKLKGSPEDNEQKQLFVEQHKHYLDEIIEQISEFSKRVILADANLDKVLSAYNKHRDKPIREQAENIIHLFTLTNLGAPAAFKYFDTTIDRKRYTSTKEVLDATLIHQSITGLYETRIDLSQLGGDGGGGGEAAAKGSSGGTLGIEDEYRLHETSTEPDVSLGSTWLSDFPQAWAETGGMGLAVRQAPLIIPLKATSTPVSIQQYPMSHEARLGIKPHIQRLLDQGILVPCQSPWNTPLLPVKKPGTNDYRPVQDLREVNKRVEDIHPTVPNPYNLLSGLPPSHQWYTVLDLKDAFFCLRLHPTSQPLFAFEWRDPGMGISGQLTWTRLPQGFKNSPTLFDEALHRDLADFRIQHPDLILLQYVDDILLAATSELDCQQGTRALLQTLGDLGYRASAKKAQICQKQVKYLGYLLREGQRWLTEARKETVMGQPVPKTPRQLREFLGTAGFCRLWIPGFAEMAAPLYPLTKTGTLFSWGPDQQKAYQEIKQALLTAPALGLPDLTKPFELFVDEKQGYAKGVLTQKLGPWRRPVAYLSKKLDPVAAGWPPCLRMVAAIAVLTKDAGKLTMGQPLVILAPHAVEALVKQPPDRWLSNARMTHYQAMLLDTDRVQFGPVVALNPATLLPLPEEGAPHDCLEILAETHGTRPDLTDQPIPDADHTWYTDGSSFLQEGQRKAGAAVTTETEVIWAGALPAGTSAQRAELIALTQALKMAEGKRLNVYTDSRYAFATAHIHGEIYRRRGLLTSEGREIKNKSEILALLKALFLPKRLSIIHCLGHQKGDSAEARGNRLADQAAREAAIKTPPDTSTLLAGKRTADGSEFEKRTADGSEFESPKKKAKVE

SEQ ID NO: 7290 - protein, 2096 aa, synthetic construct
MPAAKRVKLDGGDKKYSIGLDIGTNSVGWAVITDEYKVPSKKFKVLGNTDRHSIKKNLIGALLFDSGETAEATRLKRTARRRYTRRKNRICYLQEIFSNEMAKVDDSFFHRLEESFLVEEDKKHERHPIFGNIVDEVAYHEKYPTIYHLRKKLVDSTDKADLRLIYLALAHMIKFRGHFLIEGDLNPDNSDVDKLFIQLVQTYNQLFEENPINASGVDAKAILSARLSKSRRLENLIAQLPGEKKNGLFGNLIALSLGLTPNFKSNFDLAEDAKLQLSKDTYDDDLDNLLAQIGDQYADLFLAAKNLSDAILLSDILRVNTEITKAPLSASMIKRYDEHHQDLTLLKALVRQQLPEKYKEIFFDQSKNGYAGYIDGGASQEEFYKFIKPILEKMDGTEELLVKLNREDLLRKQRTFDNGSIPHQIHLGELHAILRRQEDFYPFLKDNREKIEKILTFRIPYYVGPLARGNSRFAWMTRKSEETITPWNFEEVVDKGASAQSFIERMTNFDKNLPNEKVLPKHSLLYEYFTVYNELTKVKYVTEGMRKPAFLSGEQKKAIVDLLFKTNRKVTVKQLKEDYFKKIECFDSVEISGVEDRFNASLGTYHDLLKIIKDKDFLDNEENEDILEDIVLTLTLFEDREMIEERLKTYAHLFDDKVMKQLKRRRYTGWGRLSRKLINGIRDKQSGKTILDFLKSDGFANRNFMQLIHDDSLTFKEDIQKAQVSGQGDSLHEHIANLAGSPAIKKGILQTVKVVDELVKVMGRHKPENIVIEMARENQTTQKGQKNSRERMKRIEEGIKELGSQILKEHPVENTQLQNEKLYLYYLQNGRDMYVDQELDINRLSDYDVDHIVPQSFLKDDSIDNKVLTRSDKARGKSDNVPSEEVVKKMKNYWRQLLNAKLITQRKFDNLTKAERGGLSELDKAGFIKRQLVETRQITKHVAQILDSRMNTKYDENDKLIREVKVITLKSKLVSDFRKDFQFYKVREINNYHHAHDAYLNAVVGTALIKKYPKLESEFVYGDYKVYDVRKMIAKSEQEIGKATAKYFFYSNIMNFFKTEITLANGEIRKRPLIETNGETGEIVWDKGRDFATVRKVLSMPQVNIVKKTEVQTGGFSKESILPKRNSDKLIARKKDWDPKKYGGFDSPTVAYSVLVVAKVEKGKSKKLKSVKELLGITIMERSSFEKNPIDFLEAKGYKEVKKDLIIKLPKYSLFELENGRKRMLASAGELQKGNELALPSKYVNFLYLASHYEKLKGSPEDNEQKQLFVEQHKHYLDEIIEQISEFSKRVILADANLDKVLSAYNKHRDKPIREQAENIIHLFTLTNLGAPAAFKYFDTTIDRKRYTSTKEVLDATLIHQSITGLYETRIDLSQLGGDGGGGGEAAAKGSSGGTLGIEDEYRLHETSTEPDVSLGSTWLSDFPQAWAETGGMGLAVRQAPLIIPLKATSTPVSIQQYPMSHEARLGIKPHIQRLLDQGILVPCQSPWNTPLLPVKKPGTNDYRPVQDLREVNKRVEDIHPTVPNPYNLLSGLPPSHQWYTVLDLKDAFFCLRLHPTSQPLFAFEWRDPGMGISGQLTWTRLPQGFKNSPTLFNEALHRDLADFRIQHPDLILLQYVDDILLAATSELDCQQGTRALLQTLGDLGYRASAKKAQICQKQVKYLGYLLREGQRWLTEARKETVMGQPVPKTPRQLREFLGTAGFCRLWIPGFAEMAAPLYPLTKPGTLFSWGPDQQKAYQEIKQALLTAPALGLPDLTKPFELFVDEKQGYAKGVLTQKLGPWRRPVAYLSKKLDPVAAGWPPCLRMVAAIAVLTKDAGKLTMGQPLVILAPHAVEALVKQPPDRWLSNARMTHYQAMLLDTDRVQFGPVVALNPATLLPLPEEGAPHDCLEILAETHGTRPDLTDQPIPDADHTWYTDGSSFLQEGQRKAGAAVTTETEVIWAGALPAGTSAQRAELIALTQALKMAEGKRLNVYTDSRYAFATAHIHGEIYRRRGWLTSEGREIKNKSEILALLKALFLPKRLSIIHCLGHQKGDSAEARGNRLADQAAREAAIKTPPDTSTLLAGKRTADGSEFEKRTADGSEFESPKKKAKVE

SEQ ID NO: 7291 - protein, 2096 aa, synthetic construct
MPAAKRVKLDGGDKKYSIGLDIGTNSVGWAVITDEYKVPSKKFKVLGNTDRHSIKKNLIGALLFDSGETAEATRLKRTARRRYTRRKNRICYLQEIFSNEMAKVDDSFFHRLEESFLVEEDKKHERHPIFGNIVDEVAYHEKYPTIYHLRKKLVDSTDKADLRLIYLALAHMIKFRGHFLIEGDLNPDNSDVDKLFIQLVQTYNQLFEENPINASGVDAKAILSARLSKSRRLENLIAQLPGEKKNGLFGNLIALSLGLTPNFKSNFDLAEDAKLQLSKDTYDDDLDNLLAQIGDQYADLFLAAKNLSDAILLSDILRVNTEITKAPLSASMIKRYDEHHQDLTLLKALVRQQLPEKYKEIFFDQSKNGYAGYIDGGASQEEFYKFIKPILEKMDGTEELLVKLNREDLLRKQRTFDNGSIPHQIHLGELHAILRRQEDFYPFLKDNREKIEKILTFRIPYYVGPLARGNSRFAWMTRKSEETITPWNFEEVVDKGASAQSFIERMTNFDKNLPNEKVLPKHSLLYEYFTVYNELTKVKYVTEGMRKPAFLSGEQKKAIVDLLFKTNRKVTVKQLKEDYFKKIECFDSVEISGVEDRFNASLGTYHDLLKIIKDKDFLDNEENEDILEDIVLTLTLFEDREMIEERLKTYAHLFDDKVMKQLKRRRYTGWGRLSRKLINGIRDKQSGKTILDFLKSDGFANRNFMQLIHDDSLTFKEDIQKAQVSGQGDSLHEHIANLAGSPAIKKGILQTVKVVDELVKVMGRHKPENIVIEMARENQTTQKGQKNSRERMKRIEEGIKELGSQILKEHPVENTQLQNEKLYLYYLQNGRDMYVDQELDINRLSDYDVDHIVPQSFLKDDSIDNKVLTRSDKARGKSDNVPSEEVVKKMKNYWRQLLNAKLITQRKFDNLTKAERGGLSELDKAGFIKRQLVETRQITKHVAQILDSRMNTKYDENDKLIREVKVITLKSKLVSDFRKDFQFYKVREINNYHHAHDAYLNAVVGTALIKKYPKLESEFVYGDYKVYDVRKMIAKSEQEIGKATAKYFFYSNIMNFFKTEITLANGEIRKRPLIETNGETGEIVWDKGRDFATVRKVLSMPQVNIVKKTEVQTGGFSKESILPKRNSDKLIARKKDWDPKKYGGFDSPTVAYSVLVVAKVEKGKSKKLKSVKELLGITIMERSSFEKNPIDFLEAKGYKEVKKDLIIKLPKYSLFELENGRKRMLASAGELQKGNELALPSKYVNFLYLASHYEKLKGSPEDNEQKQLFVEQHKHYLDEIIEQISEFSKRVILADANLDKVLSAYNKHRDKPIREQAENIIHLFTLTNLGAPAAFKYFDTTIDRKRYTSTKEVLDATLIHQSITGLYETRIDLSQLGGDGGGGGEAAAKGSSGGTLNIEDEYRLHETSKEPDVSLGSTWLSDFPQAWAETGGMGLAVRQAPLIIPLKATSTPVSIKQYPMSQEARLGIKPHIQRLLDQGILVPCQSPWNTPLLPVKKPGTNDYRPVQDLREVNKRVEDIHPTVPNPYNLLSGLPPSHQWYTVLDLKDAFFCLRLHPTSQPLFAFEWRDPEMGISGQLTWTRLPQGFKNSPTLFNEALHRDLAGFRIQHPDLILLQYVDDLLLAATSELDCQQGTRALLQTLGDLGYRASAKKAQICQKQVKYLGYLLKEGQRWLTEARKETVMGQPIPKTPRQLREFLGTAGFCRLWIPGFAEMAAPLYPLTKPGTLFNWGPDQQKAFQEIKQALLTAPALGLPDLTKPFELFVDEKQGYAKGVLTQKLGPWRRPVAYLSKKLDPVAAGWPPCLRMVAAIAVLTKDAGKLTMGQPLVILAPHAVEALVKQPPDRWLSNARMTHYQALLLDTDRVQFGPVVALNPATLLPLPEEGLQHDCLDILAEAHGTRSDLMDQPLPDADHTWYTDGSSFLQEGQRKAGAAVTTETEVIWARALPAGTSAQRAELIALTQALKMAEGKKLNVYTDSRYAFATAHIHGEIYRRRGWLTSEGKEIKNKDEILALLKALFLPKRLSIIHCPGHQKGNSAEARGNRMADQAAREVATRETPETSTLLAGKRTADGSEFEKRTADGSEFESPKKKAKVE

SEQ ID NO: 7292 - protein, 2096 aa, synthetic construct
MPAAKRVKLDGGDKKYSIGLDIGTNSVGWAVITDEYKVPSKKFKVLGNTDRHSIKKNLIGALLFDSGETAEATRLKRTARRRYTRRKNRICYLQEIFSNEMAKVDDSFFHRLEESFLVEEDKKHERHPIFGNIVDEVAYHEKYPTIYHLRKKLVDSTDKADLRLIYLALAHMIKFRGHFLIEGDLNPDNSDVDKLFIQLVQTYNQLFEENPINASGVDAKAILSARLSKSRRLENLIAQLPGEKKNGLFGNLIALSLGLTPNFKSNFDLAEDAKLQLSKDTYDDDLDNLLAQIGDQYADLFLAAKNLSDAILLSDILRVNTEITKAPLSASMIKRYDEHHQDLTLLKALVRQQLPEKYKEIFFDQSKNGYAGYIDGGASQEEFYKFIKPILEKMDGTEELLVKLNREDLLRKQRTFDNGSIPHQIHLGELHAILRRQEDFYPFLKDNREKIEKILTFRIPYYVGPLARGNSRFAWMTRKSEETITPWNFEEVVDKGASAQSFIERMTNFDKNLPNEKVLPKHSLLYEYFTVYNELTKVKYVTEGMRKPAFLSGEQKKAIVDLLFKTNRKVTVKQLKEDYFKKIECFDSVEISGVEDRFNASLGTYHDLLKIIKDKDFLDNEENEDILEDIVLTLTLFEDREMIEERLKTYAHLFDDKVMKQLKRRRYTGWGRLSRKLINGIRDKQSGKTILDFLKSDGFANRNFMQLIHDDSLTFKEDIQKAQVSGQGDSLHEHIANLAGSPAIKKGILQTVKVVDELVKVMGRHKPENIVIEMARENQTTQKGQKNSRERMKRIEEGIKELGSQILKEHPVENTQLQNEKLYLYYLQNGRDMYVDQELDINRLSDYDVDHIVPQSFLKDDSIDNKVLTRSDKARGKSDNVPSEEVVKKMKNYWRQLLNAKLITQRKFDNLTKAERGGLSELDKAGFIKRQLVETRQITKHVAQILDSRMNTKYDENDKLIREVKVITLKSKLVSDFRKDFQFYKVREINNYHHAHDAYLNAVVGTALIKKYPKLESEFVYGDYKVYDVRKMIAKSEQEIGKATAKYFFYSNIMNFFKTEITLANGEIRKRPLIETNGETGEIVWDKGRDFATVRKVLSMPQVNIVKKTEVQTGGFSKESILPKRNSDKLIARKKDWDPKKYGGFDSPTVAYSVLVVAKVEKGKSKKLKSVKELLGITIMERSSFEKNPIDFLEAKGYKEVKKDLIIKLPKYSLFELENGRKRMLASAGELQKGNELALPSKYVNFLYLASHYEKLKGSPEDNEQKQLFVEQHKHYLDEIIEQISEFSKRVILADANLDKVLSAYNKHRDKPIREQAENIIHLFTLTNLGAPAAFKYFDTTIDRKRYTSTKEVLDATLIHQSITGLYETRIDLSQLGGDGGGGGEAAAKGSSGGTLNIEDEYRLHETSKGPDVPLGSTWLSDFPQAWAETGGMGLAVRQAPLIIPLKATSTPVSIKQYPMSQEARLGIKPHIQRLLDQGILVPCQSPWNTPLLPVKKPGTNDYRPVQDLREVNKRVEDIHPTVPNPYNLLSGLPPSHQWYTVLDLKDAFFCLRLHPTSQSLFAFEWRDPEMGISGQLTWTRLPQGFKNSPTLFNEALHRDLADFRIQHPDLILLQYVDDLLLAATSELDCQQGTRALLQTLGDLGYRASAKKAQICQKQVKYLGYLLKEGQRWLTEARKETVMGQPTPKTPRQLREFLGTAGFCRLWIPGFAEMAAPLYPLTKPGTLFEWGPDQQKAYQEIKQALLTAPALGLPDLTKPFELFVDEKQGYAKGVLTQKLGPWRRPVAYLSKKLDPVAAGWPPCLRMVAAIAVLTKDAGKLTMGQPLVILAPHAVEALVKQPPDRWLSNARMTHYQALLLDTDRVQFGPIVALNPATLLPLPEEGLQHDCLDILAEAHGTRPDLTDQPLPDADHTWYTDGSSFLQEGQRKAGAAVTTETEVVWAKALPAGTSAQRAELIALTQALKMAEGKKLNVYTDSRYAFATAHIHGEIYRRRGWLTSEGKEIKNKDEILALLKALFLPKRLSIIHCPGHQKGNRAEARGNRMADQAAREVATRETPETSTLLAGKRTADGSEFEKRTADGSEFESPKKKAKVE

SEQ ID NO: 7293 - protein, 2096 aa, synthetic construct; identical to SEQ ID NO: 4530

SEQ ID NO: 7294 - protein, 2096 aa, synthetic construct
MPAAKRVKLDGGDKKYSIGLDIGTNSVGWAVITDEYKVPSKKFKVLGNTDRHSIKKNLIGALLFDSGETAEATRLKRTARRRYTRRKNRICYLQEIFSNEMAKVDDSFFHRLEESFLVEEDKKHERHPIFGNIVDEVAYHEKYPTIYHLRKKLVDSTDKADLRLIYLALAHMIKFRGHFLIEGDLNPDNSDVDKLFIQLVQTYNQLFEENPINASGVDAKAILSARLSKSRRLENLIAQLPGEKKNGLFGNLIALSLGLTPNFKSNFDLAEDAKLQLSKDTYDDDLDNLLAQIGDQYADLFLAAKNLSDAILLSDILRVNTEITKAPLSASMIKRYDEHHQDLTLLKALVRQQLPEKYKEIFFDQSKNGYAGYIDGGASQEEFYKFIKPILEKMDGTEELLVKLNREDLLRKQRTFDNGSIPHQIHLGELHAILRRQEDFYPFLKDNREKIEKILTFRIPYYVGPLARGNSRFAWMTRKSEETITPWNFEEVVDKGASAQSFIERMTNFDKNLPNEKVLPKHSLLYEYFTVYNELTKVKYVTEGMRKPAFLSGEQKKAIVDLLFKTNRKVTVKQLKEDYFKKIECFDSVEISGVEDRFNASLGTYHDLLKIIKDKDFLDNEENEDILEDIVLTLTLFEDREMIEERLKTYAHLFDDKVMKQLKRRRYTGWGRLSRKLINGIRDKQSGKTILDFLKSDGFANRNFMQLIHDDSLTFKEDIQKAQVSGQGDSLHEHIANLAGSPAIKKGILQTVKVVDELVKVMGRHKPENIVIEMARENQTTQKGQKNSRERMKRIEEGIKELGSQILKEHPVENTQLQNEKLYLYYLQNGRDMYVDQELDINRLSDYDVDHIVPQSFLKDDSIDNKVLTRSDKARGKSDNVPSEEVVKKMKNYWRQLLNAKLITQRKFDNLTKAERGGLSELDKAGFIKRQLVETRQITKHVAQILDSRMNTKYDENDKLIREVKVITLKSKLVSDFRKDFQFYKVREINNYHHAHDAYLNAVVGTALIKKYPKLESEFVYGDYKVYDVRKMIAKSEQEIGKATAKYFFYSNIMNFFKTEITLANGEIRKRPLIETNGETGEIVWDKGRDFATVRKVLSMPQVNIVKKTEVQTGGFSKESILPKRNSDKLIARKKDWDPKKYGGFDSPTVAYSVLVVAKVEKGKSKKLKSVKELLGITIMERSSFEKNPIDFLEAKGYKEVKKDLIIKLPKYSLFELENGRKRMLASAGELQKGNELALPSKYVNFLYLASHYEKLKGSPEDNEQKQLFVEQHKHYLDEIIEQISEFSKRVILADANLDKVLSAYNKHRDKPIREQAENIIHLFTLTNLGAPAAFKYFDTTIDRKRYTSTKEVLDATLIHQSITGLYETRIDLSQLGGDGGGGGEAAAKGSSGGTLNIEDEHRLHETSKEPDVSLGSTWLSDFPQAWAETGGMGLAVRQAPLIIPLKATSTPVSIKQYPMSQEARLGIKPHIQRLLDQGILVPCQSPWNTPLLPVKKPGTNDYRPVQDLREVNKRVEDIHPTVPNPYNLLSGLPPSHQWYTVLDLKDAFFCLRLHPTSQPLFAFEWRDPEMGISGQLTWTRLPQGFKNSPTLFDEALHRDLADFRIQHPDLILLQYVDDLLLAATSELDCQQGTRALLQTLGNLGYRASAKKAQICQKQVKYLGYLLKEGQRWLTEARKETVMGQPTPKTPRQLREFLGTAGFCRLWIPGFAEMAAPLYPLTKTGTLFNWGPDQQKAYQEIKQALLTAPALGLPDLTKPFELFVDEKQGYAKGVLTQKLGPWRRPVAYLSKKLDPVAAGWPPCLRMVAAIAVLTKDAGKLTMGQPLVILAPHAVEALVKQPPDRWLSNARMTHYQALLLDTDRVQFGPVVALNPATLLPLPEEGLQHNCLDILAEAHGTRPDLTDQPLPDADHTWYTDGSSLLQEGQRKAGAAVTTETEVIWAKALPAGTSAQRAELIALTQALKMAEGKKLNVYTDSRYAFATAHIHGEIYRRRGLLTSEGKEIKNKDEILALLKALFLPKRLSIIHCPGHQKGHSAEARGNRMADQAARKAAITETPDTSTLLAGKRTADGSEFEKRTADGSEFESPKKKAKVE

SEQ ID NO: 7295 - protein, 2096 aa, synthetic construct; identical to SEQ ID NO: 4530

SEQ ID NO: 7296 - protein, 2090 aa, synthetic construct
MPAAKRVKLDGGDKKYSIGLDIGTNSVGWAVITDEYKVPSKKFKVLGNTDRHSIKKNLIGALLFDSGETAEATRLKRTARRRYTRRKNRICYLQEIFSNEMAKVDDSFFHRLEESFLVEEDKKHERHPIFGNIVDEVAYHEKYPTIYHLRKKLVDSTDKADLRLIYLALAHMIKFRGHFLIEGDLNPDNSDVDKLFIQLVQTYNQLFEENPINASGVDAKAILSARLSKSRRLENLIAQLPGEKKNGLFGNLIALSLGLTPNFKSNFDLAEDAKLQLSKDTYDDDLDNLLAQIGDQYADLFLAAKNLSDAILLSDILRVNTEITKAPLSASMIKRYDEHHQDLTLLKALVRQQLPEKYKEIFFDQSKNGYAGYIDGGASQEEFYKFIKPILEKMDGTEELLVKLNREDLLRKQRTFDNGSIPHQIHLGELHAILRRQEDFYPFLKDNREKIEKILTFRIPYYVGPLARGNSRFAWMTRKSEETITPWNFEEVVDKGASAQSFIERMTNFDKNLPNEKVLPKHSLLYEYFTVYNELTKVKYVTEGMRKPAFLSGEQKKAIVDLLFKTNRKVTVKQLKEDYFKKIECFDSVEISGVEDRFNASLGTYHDLLKIIKDKDFLDNEENEDILEDIVLTLTLFEDREMIEERLKTYAHLFDDKVMKQLKRRRYTGWGRLSRKLINGIRDKQSGKTILDFLKSDGFANRNFMQLIHDDSLTFKEDIQKAQVSGQGDSLHEHIANLAGSPAIKKGILQTVKVVDELVKVMGRHKPENIVIEMARENQTTQKGQKNSRERMKRIEEGIKELGSQILKEHPVENTQLQNEKLYLYYLQNGRDMYVDQELDINRLSDYDVDHIVPQSFLKDDSIDNKVLTRSDKARGKSDNVPSEEVVKKMKNYWRQLLNAKLITQRKFDNLTKAERGGLSELDKAGFIKRQLVETRQITKHVAQILDSRMNTKYDENDKLIREVKVITLKSKLVSDFRKDFQFYKVREINNYHHAHDAYLNAVVGTALIKKYPKLESEFVYGDYKVYDVRKMIAKSEQEIGKATAKYFFYSNIMNFFKTEITLANGEIRKRPLIETNGETGEIVWDKGRDFATVRKVLSMPQVNIVKKTEVQTGGFSKESILPKRNSDKLIARKKDWDPKKYGGFDSPTVAYSVLVVAKVEKGKSKKLKSVKELLGITIMERSSFEKNPIDFLEAKGYKEVKKDLIIKLPKYSLFELENGRKRMLASAGELQKGNELALPSKYVNFLYLASHYEKLKGSPEDNEQKQLFVEQHKHYLDEIIEQISEFSKRVILADANLDKVLSAYNKHRDKPIREQAENIIHLFTLTNLGAPAAFKYFDTTIDRKRYTSTKEVLDATLIHQSITGLYETRIDLSQLGGDGGGGGEAAAKGSSGGTLQLDDEYRLYSPLVKPDQNIQFWLEQFPQAWAETAGMGLAKQVPPQVIQLKASATPVSVRQYPLSKEAQEGIRPHVQRLIQQGILVPVQSPWNTPLLPVRKPGTNDYRPVQDLREVNKRVQDIHPTVPNPYNLLCALPPQRSWYTVLDLKDAFFCLRLHPTSQPLFAFEWRDPGTGRTGQLTWTRLPQGFKNSPTIFDEALHRDLANFRIQHPQVTLLQYVDDLLLAGATKQDCLEGTKALLLELSDLGYRASAKKAQICRREVTYLGYSLRDGQRWLTEARKKTVVQIPAPTTAKQVREFLGTAGFCRLWIPGFATLAAPLYPLTKEKGEFSWAPEHQKAFDAIKKALLSAPALALPDVTKPFTLYVDERKGVARGVLTQTLGPWRRPVAYLSKKLDPVASGWPVCLKAIAAVAILVKDADKLTLGQNITVIAPHALENIVRQPPDRWMTNARMTHYQSLLLTERVTFAPPAALNPATLLPEETDEPVTHDCHQLLIEETGVRKDLTDIPLTGEVLTWFTDGSSYVVEGKRMAGAAVVDGTRTIWASSLPEGTSAQKAELMALTQALRLAEGKSINIYTDSRYAFATAHVHGAIYKQRGLLTSAGREIKNKEEILSLLEALHLPKRLAIIHCPGHQKAKDPISRGNQMADRVAKQAAQGVNLLAGKRTADGSEFEKRTADGSEFESPKKKAKVE

SEQ ID NO: 7297 - protein, 2176 aa, synthetic construct
MPAAKRVKLDGGDKKYSIGLDIGTNSVGWAVITDEYKVPSKKFKVLGNTDRHSIKKNLIGALLFDSGETAEATRLKRTARRRYTRRKNRICYLQEIFSNEMAKVDDSFFHRLEESFLVEEDKKHERHPIFGNIVDEVAYHEKYPTIYHLRKKLVDSTDKADLRLIYLALAHMIKFRGHFLIEGDLNPDNSDVDKLFIQLVQTYNQLFEENPINASGVDAKAILSARLSKSRRLENLIAQLPGEKKNGLFGNLIALSLGLTPNFKSNFDLAEDAKLQLSKDTYDDDLDNLLAQIGDQYADLFLAAKNLSDAILLSDILRVNTEITKAPLSASMIKRYDEHHQDLTLLKALVRQQLPEKYKEIFFDQSKNGYAGYIDGGASQEEFYKFIKPILEKMDGTEELLVKLNREDLLRKQRTFDNGSIPHQIHLGELHAILRRQEDFYPFLKDNREKIEKILTFRIPYYVGPLARGNSRFAWMTRKSEETITPWNFEEVVDKGASAQSFIERMTNFDKNLPNEKVLPKHSLLYEYFTVYNELTKVKYVTEGMRKPAFLSGEQKKAIVDLLFKTNRKVTVKQLKEDYFKKIECFDSVEISGVEDRFNASLGTYHDLLKIIKDKDFLDNEENEDILEDIVLTLTLFEDREMIEERLKTYAHLFDDKVMKQLKRRRYTGWGRLSRKLINGIRDKQSGKTILDFLKSDGFANRNFMQLIHDDSLTFKEDIQKAQVSGQGDSLHEHIANLAGSPAIKKGILQTVKVVDELVKVMGRHKPENIVIEMARENQTTQKGQKNSRERMKRIEEGIKELGSQILKEHPVENTQLQNEKLYLYYLQNGRDMYVDQELDINRLSDYDVDHIVPQSFLKDDSIDNKVLTRSDKARGKSDNVPSEEVVKKMKNYWRQLLNAKLITQRKFDNLTKAERGGLSELDKAGFIKRQLVETRQITKHVAQILDSRMNTKYDENDKLIREVKVITLKSKLVSDFRKDFQFYKVREINNYHHAHDAYLNAVVGTALIKKYPKLESEFVYGDYKVYDVRKMIAKSEQEIGKATAKYFFYSNIMNFFKTEITLANGEIRKRPLIETNGETGEIVWDKGRDFATVRKVLSMPQVNIVKKTEVQTGGFSKESILPKRNSDKLIARKKDWDPKKYGGFDSPTVAYSVLVVAKVEKGKSKKLKSVKELLGITIMERSSFEKNPIDFLEAKGYKEVKKDLIIKLPKYSLFELENGRKRMLASAGELQKGNELALPSKYVNFLYLASHYEKLKGSPEDNEQKQLFVEQHKHYLDEIIEQISEFSKRVILADANLDKVLSAYNKHRDKPIREQAENIIHLFTLTNLGAPAAFKYFDTTIDRKRYTSTKEVLDATLIHQSITGLYETRIDLSQLGGDGGGGGEAAAKGSSGGMNPLQLLQPLPAEVKGTKLLAHWNSGATITCIPESFLEDEQPIKQTLIKTIHGEKQQNVYYLTFKVKGRKVEAEVIASPYEYILLSPTDVPWLTQQPLQLTILVPLQEYQDRILNKTALPEEQKQQLKALFTKYDNLWQHWENQVGHRKIRPHNIATGDYPPRPQKQYPINPKAKPSIQIVIDDLLKQGVLTPQNSTMNTPVYPVPKPDGRWRMVLDYREVNKTIPLTAAQNQHSAGILATIVRQKYKTTLDLANGFWAHPITPDSYWLTAFTWQGKQYCWTRLPQGFLNSPALFTADAVDLLKEVPNVQVYVDDIYLSHDNPHEHIQQLEKVFQILLQAGYVVSLKKSEIGQRTVEFLGFNITKEGRGLTDTFKTKLLNVTPPKDLKQLQSILGLLNFARNFIPNFAELVQTLYNLIASSKGKYIEWTEDNTKQLNKVIEALNTASNLEERLPDQRLVIKVNTSPSAGYVRYYNESGKKPIMYLNYVFSKAELKFSMLEKLLTTMHKALIKAMDLAMGQEILVYSPIVSMTKIQKTPLPERKALPIRWITWMTYLEDPRIQFHYDKTLPELKHIPDVYTSSIPPLKHPSQYEGVFCTDGSAIKSPDPTKSNNAGMGIVHAIYNPEYKILNQWSIPLGHHTAQMAEIAAVEFACKKALKVPGPVLVITDSFYVAESANKELPYWKSNGFVNNKKEPLKHISKWKSIAECLSIKPDITIQHEKGHQPINTSIHTEGNALADKLATQGSYVVNAGKRTADGSEFEKRTADGSEFESPKKKAKVE

SEQ ID NO: 7298 - protein, 2096 aa, synthetic construct
MPAAKRVKLDGGDKKYSIGLDIGTNSVGWAVITDEYKVPSKKFKVLGNTDRHSIKKNLIGALLFDSGETAEATRLKRTARRRYTRRKNRICYLQEIFSNEMAKVDDSFFHRLEESFLVEEDKKHERHPIFGNIVDEVAYHEKYPTIYHLRKKLVDSTDKADLRLIYLALAHMIKFRGHFLIEGDLNPDNSDVDKLFIQLVQTYNQLFEENPINASGVDAKAILSARLSKSRRLENLIAQLPGEKKNGLFGNLIALSLGLTPNFKSNFDLAEDAKLQLSKDTYDDDLDNLLAQIGDQYADLFLAAKNLSDAILLSDILRVNTEITKAPLSASMIKRYDEHHQDLTLLKALVRQQLPEKYKEIFFDQSKNGYAGYIDGGASQEEFYKFIKPILEKMDGTEELLVKLNREDLLRKQRTFDNGSIPHQIHLGELHAILRRQEDFYPFLKDNREKIEKILTFRIPYYVGPLARGNSRFAWMTRKSEETITPWNFEEVVDKGASAQSFIERMTNFDKNLPNEKVLPKHSLLYEYFTVYNELTKVKYVTEGMRKPAFLSGEQKKAIVDLLFKTNRKVTVKQLKEDYFKKIECFDSVEISGVEDRFNASLGTYHDLLKIIKDKDFLDNEENEDILEDIVLTLTLFEDREMIEERLKTYAHLFDDKVMKQLKRRRYTGWGRLSRKLINGIRDKQSGKTILDFLKSDGFANRNFMQLIHDDSLTFKEDIQKAQVSGQGDSLHEHIANLAGSPAIKKGILQTVKVVDELVKVMGRHKPENIVIEMARENQTTQKGQKNSRERMKRIEEGIKELGSQILKEHPVENTQLQNEKLYLYYLQNGRDMYVDQELDINRLSDYDVDHIVPQSFLKDDSIDNKVLTRSDKARGKSDNVPSEEVVKKMKNYWRQLLNAKLITQRKFDNLTKAERGGLSELDKAGFIKRQLVETRQITKHVAQILDSRMNTKYDENDKLIREVKVITLKSKLVSDFRKDFQFYKVREINNYHHAHDAYLNAVVGTALIKKYPKLESEFVYGDYKVYDVRKMIAKSEQEIGKATAKYFFYSNIMNFFKTEITLANGEIRKRPLIETNGETGEIVWDKGRDFATVRKVLSMPQVNIVKKTEVQTGGFSKESILPKRNSDKLIARKKDWDPKKYGGFDSPTVAYSVLVVAKVEKGKSKKLKSVKELLGITIMERSSFEKNPIDFLEAKGYKEVKKDLIIKLPKYSLFELENGRKRMLASAGELQKGNELALPSKYVNFLYLASHYEKLKGSPEDNEQKQLFVEQHKHYLDEIIEQISEFSKRVILADANLDKVLSAYNKHRDKPIREQAENIIHLFTLTNLGAPAAFKYFDTTIDRKRYTSTKEVLDATLIHQSITGLYETRIDLSQLGGDGGGGGEAAAKGSSGGTLNIEDEYRLHETSKEPDVPLGSTWLSDFPQAWAETGGMGLAVRQAPLIIPLKATSTPVSIKQYPMSQEARLGIKPHIQRLLDQGILVPCQSPWNTPLLPVKKPGTNDYRPVQDLREVNKRVEDIHPTVPNPYNLLSGLPPSHQWYTVLDLKDAFFCLRLHPTSQPLFAFEWRDPEMGISGQLTWTRLPQGFKNSPTLFNEALHRDLADFRIQHPDLILLQYVDDLLLAATSEQDCQRGTRALLQTLGNLGYRASAKKAQICQKQVKYLGYLLKEGQRWLTEARKETVMGQPTPKTPRQLREFLGTAGFCRLWIPGFAEMAAPLYPLTKPGTLFNWGPDQQKAYQEIKQALLTAPALGLPDLTKPFELFVDEKQGYAKGVLTQKLGPWRRPVAYLSKKLDPVAAGWPPCLRMVAAIAVLTKDAGKLTMGQPLVILAPHAVEALVKQPPDRWLSNARMTHYQAMLLDTDRVQFGPVVALNPATLLPLPEKEAPHDCLEILAETHGTRPDLTDQPIPDADYTWYTDGSSFLQEGQRRAGAAVTTETEVIWARALPAGTSAQRAELIALTQALKMAEGKKLNVYTDSRYAFATAHVHGEIYRRRGWLTSEGREIKNKNEILALLKALFLPKRLSIIHCPGHQKGNSAEARGNRMADQAAREAAMKAVLETSTLLAGKRTADGSEFEKRTADGSEFESPKKKAKVE

SEQ ID NO: 7299 - protein, 2102 aa, synthetic construct
MPAAKRVKLDGGDKKYSIGLDIGTNSVGWAVITDEYKVPSKKFKVLGNTDRHSIKKNLIGALLFDSGETAEATRLKRTARRRYTRRKNRICYLQEIFSNEMAKVDDSFFHRLEESFLVEEDKKHERHPIFGNIVDEVAYHEKYPTIYHLRKKLVDSTDKADLRLIYLALAHMIKFRGHFLIEGDLNPDNSDVDKLFIQLVQTYNQLFEENPINASGVDAKAILSARLSKSRRLENLIAQLPGEKKNGLFGNLIALSLGLTPNFKSNFDLAEDAKLQLSKDTYDDDLDNLLAQIGDQYADLFLAAKNLSDAILLSDILRVNTEITKAPLSASMIKRYDEHHQDLTLLKALVRQQLPEKYKEIFFDQSKNGYAGYIDGGASQEEFYKFIKPILEKMDGTEELLVKLNREDLLRKQRTFDNGSIPHQIHLGELHAILRRQEDFYPFLKDNREKIEKILTFRIPYYVGPLARGNSRFAWMTRKSEETITPWNFEEVVDKGASAQSFIERMTNFDKNLPNEKVLPKHSLLYEYFTVYNELTKVKYVTEGMRKPAFLSGEQKKAIVDLLFKTNRKVTVKQLKEDYFKKIECFDSVEISGVEDRFNASLGTYHDLLKIIKDKDFLDNEENEDILEDIVLTLTLFEDREMIEERLKTYAHLFDDKVMKQLKRRRYTGWGRLSRKLINGIRDKQSGKTILDFLKSDGFANRNFMQLIHDDSLTFKEDIQKAQVSGQGDSLHEHIANLAGSPAIKKGILQTVKVVDELVKVMGRHKPENIVIEMARENQTTQKGQKNSRERMKRIEEGIKELGSQILKEHPVENTQLQNEKLYLYYLQNGRDMYVDQELDINRLSDYDVDHIVPQSFLKDDSIDNKVLTRSDKARGKSDNVPSEEVVKKMKNYWRQLLNAKLITQRKFDNLTKAERGGLSELDKAGFIKRQLVETRQITKHVAQILDSRMNTKYDENDKLIREVKVITLKSKLVSDFRKDFQFYKVREINNYHHAHDAYLNAVVGTALIKKYPKLESEFVYGDYKVYDVRKMIAKSEQEIGKATAKYFFYSNIMNFFKTEITLANGEIRKRPLIETNGETGEIVWDKGRDFATVRKVLSMPQVNIVKKTEVQTGGFSKESILPKRNSDKLIARKKDWDPKKYGGFDSPTVAYSVLVVAKVEKGKSKKLKSVKELLGITIMERSSFEKNPIDFLEAKGYKEVKKDLIIKLPKYSLFELENGRKRMLASAGELQKGNELALPSKYVNFLYLASHYEKLKGSPEDNEQKQLFVEQHKHYLDEIIEQISEFSKRVILADANLDKVLSAYNKHRDKPIREQAENIIHLFTLTNLGAPAAFKYFDTTIDRKRYTSTKEVLDATLIHQSITGLYETRIDLSQLGGDGGGSSGGGEAAAKGGTVSLQDEHRLFDIPVTTSLPDVWLQDFPQAWAETGGLGRAKCQAPIIIDLKPTAVPVSIKQYPMSLEAHMGIRQHIIKFLELGVLRPCRSPWNTPLLPVKKPGTQDYRPVQDLREINKRTVDIHPTVPNPYNLLSTLKPDYSWYTVLDLKDAFFCLPLAPQSQELFAFEWKDPERGISGQLTWTRLPQGFKNSPTLFNEALHRDLTDFRTQHPEVTLLQYVDDLLLAAPTKKACTQGTRHLLQELGEKGYRASAKKAQICQTKVTYLGYILSEGKRWLTPGRIETVARIPPPRNPREVREFLGTAGFCRLWIPGFAELAAPLYALTKPSTPFTWQTEHQLAFEALKKALLSAPALGLPDTSKPFTLFLDERQGIAKGVLTQKLGPWKRPVAYLSKKLDPVAAGWPPCLRIMAATAMLVKDSAKLTLGQPLTVITPHTLEAIVRQPPDRWITNARLTHYQALLLDTDRVQFGPPVTLNPATLLPVPENQPSPHDCRQVLAETHGTREDLKDQELPDADHTWYTDGSSYLDSGTRRAGAAVVDGHNTIWAQSLPPGTSAQKAELIALTKALELSKGKKANIYTDSRYAFATAHTHGSIYERRGWLTSEGKEIKNKAEIIALLKALFLPQEVAIIHCPGHQKGQDPVAVGNRQADRVARQAAMAEVLTLATEPDNTSHITAGKRTADGSEFEKRTADGSEFESPKKKAKVE

SEQ ID NO: 7300 - protein, 2218 aa, synthetic construct
MPAAKRVKLDGGDKKYSIGLDIGTNSVGWAVITDEYKVPSKKFKVLGNTDRHSIKKNLIGALLFDSGETAEATRLKRTARRRYTRRKNRICYLQEIFSNEMAKVDDSFFHRLEESFLVEEDKKHERHPIFGNIVDEVAYHEKYPTIYHLRKKLVDSTDKADLRLIYLALAHMIKFRGHFLIEGDLNPDNSDVDKLFIQLVQTYNQLFEENPINASGVDAKAILSARLSKSRRLENLIAQLPGEKKNGLFGNLIALSLGLTPNFKSNFDLAEDAKLQLSKDTYDDDLDNLLAQIGDQYADLFLAAKNLSDAILLSDILRVNTEITKAPLSASMIKRYDEHHQDLTLLKALVRQQLPEKYKEIFFDQSKNGYAGYIDGGASQEEFYKFIKPILEKMDGTEELLVKLNREDLLRKQRTFDNGSIPHQIHLGELHAILRRQEDFYPFLKDNREKIEKILTFRIPYYVGPLARGNSRFAWMTRKSEETITPWNFEEVVDKGASAQSFIERMTNFDKNLPNEKVLPKHSLLYEYFTVYNELTKVKYVTEGMRKPAFLSGEQKKAIVDLLFKTNRKVTVKQLKEDYFKKIECFDSVEISGVEDRFNASLGTYHDLLKIIKDKDFLDNEENEDILEDIVLTLTLFEDREMIEERLKTYAHLFDDKVMKQLKRRRYTGWGRLSRKLINGIRDKQSGKTILDFLKSDGFANRNFMQLIHDDSLTFKEDIQKAQVSGQGDSLHEHIANLAGSPAIKKGILQTVKVVDELVKVMGRHKPENIVIEMARENQTTQKGQKNSRERMKRIEEGIKELGSQILKEHPVENTQLQNEKLYLYYLQNGRDMYVDQELDINRLSDYDVDHIVPQSFLKDDSIDNKVLTRSDKARGKSDNVPSEEVVKKMKNYWRQLLNAKLITQRKFDNLTKAERGGLSELDKAGFIKRQLVETRQITKHVAQILDSRMNTKYDENDKLIREVKVITLKSKLVSDFRKDFQFYKVREINNYHHAHDAYLNAVVGTALIKKYPKLESEFVYGDYKVYDVRKMIAKSEQEIGKATAKYFFYSNIMNFFKTEITLANGEIRKRPLIETNGETGEIVWDKGRDFATVRKVLSMPQVNIVKKTEVQTGGFSKESILPKRNSDKLIARKKDWDPKKYGGFDSPTVAYSVLVVAKVEKGKSKKLKSVKELLGITIMERSSFEKNPIDFLEAKGYKEVKKDLIIKLPKYSLFELENGRKRMLASAGELQKGNELALPSKYVNFLYLASHYEKLKGSPEDNEQKQLFVEQHKHYLDEIIEQISEFSKRVILADANLDKVLSAYNKHRDKPIREQAENIIHLFTLTNLGAPAAFKYFDTTIDRKRYTSTKEVLDATLIHQSITGLYETRIDLSQLGGDGGGSSGGGEAAAKGGTLGDQGSRGSDPLPEPRVTLTVEGIPTEFLVNTGAEHSVLTKPMGKMGSKRTVVAGATGSKVYPWTTKRLLKIGQKQVTHSFLVIPECPAPLLGRDLLTKLKAQIQFSTEGPQVTWEDRPAMCLVLNLEEEYRLHEKPVPPSIDPSWLQLFPMVWAEKAGMGLANQVPPVVVELKSDASPVAVRQYPMSKEAREGIRPHIQRFLDLGILVPCQSPWNTPLLPVKKPGTNDYRPVQDLREVNKRVQDIHPTVPNPYNLLSSLPPSHTWYSVLDLKDAFFCLKLHPNSQPLFAFEWRDPEKGNTGQLTWTRLPQGFKNSPTLFDEALHRDLASFRALNPQVVMLQYVDDLLVAAPTYRDCKEGTRRLLQELSKLGYRVSAKKAQLCREEVTYLGYLLKGGKRWLTPARKATVMKIPTPTTPRQVREFLGTAGFCRLWIPGFASLAAPLYPLTREKVPFTWTEAHQEAFGRIKEALLSAPALALPDLTKPFALYVDEKEGVARGVLTQTLGPWRRPVAYLSKKLDPVASGWPTCLKAIAAVALLLKDADKLTLGQNVLVIAPHNLESIVRQPPDRWMTNARMTHYQSLLLNERVSFAPPAILNPATLLPVESDDTPIHICSEILAEETGTRPDLRDQPLPGVPAWYTDGSSFIMDGRRQAGAAIVDNKRTVWASNLPEGTSAQKAELIALTQALRLAEGKSINIYTDSRYAFATAHVHGAIYKQRGLLTSAGKDIKNKEEILALLEAIHLPKRVAIIHCPGHQRGTDPVATGNRKADEAAKQAAQSTRILTETTKNAGKRTADGSEFEKRTADGSEFESPKKKAKVE

SEQ ID NO: 7301 - protein, 2127 aa, synthetic construct
MPAAKRVKLDGGDKKYSIGLDIGTNSVGWAVITDEYKVPSKKFKVLGNTDRHSIKKNLIGALLFDSGETAEATRLKRTARRRYTRRKNRICYLQEIFSNEMAKVDDSFFHRLEESFLVEEDKKHERHPIFGNIVDEVAYHEKYPTIYHLRKKLVDSTDKADLRLIYLALAHMIKFRGHFLIEGDLNPDNSDVDKLFIQLVQTYNQLFEENPINASGVDAKAILSARLSKSRRLENLIAQLPGEKKNGLFGNLIALSLGLTPNFKSNFDLAEDAKLQLSKDTYDDDLDNLLAQIGDQYADLFLAAKNLSDAILLSDILRVNTEITKAPLSASMIKRYDEHHQDLTLLKALVRQQLPEKYKEIFFDQSKNGYAGYIDGGASQEEFYKFIKPILEKMDGTEELLVKLNREDLLRKQRTFDNGSIPHQIHLGELHAILRRQEDFYPFLKDNREKIEKILTFRIPYYVGPLARGNSRFAWMTRKSEETITPWNFEEVVDKGASAQSFIERMTNFDKNLPNEKVLPKHSLLYEYFTVYNELTKVKYVTEGMRKPAFLSGEQKKAIVDLLFKTNRKVTVKQLKEDYFKKIECFDSVEISGVEDRFNASLGTYHDLLKIIKDKDFLDNEENEDILEDIVLTLTLFEDREMIEERLKTYAHLFDDKVMKQLKRRRYTGWGRLSRKLINGIRDKQSGKTILDFLKSDGFANRNFMQLIHDDSLTFKEDIQKAQVSGQGDSLHEHIANLAGSPAIKKGILQTVKVVDELVKVMGRHKPENIVIEMARENQTTQKGQKNSRERMKRIEEGIKELGSQILKEHPVENTQLQNEKLYLYYLQNGRDMYVDQELDINRLSDYDVDHIVPQSFLKDDSIDNKVLTRSDKARGKSDNVPSEEVVKKMKNYWRQLLNAKLITQRKFDNLTKAERGGLSELDKAGFIKRQLVETRQITKHVAQILDSRMNTKYDENDKLIREVKVITLKSKLVSDFRKDFQFYKVREINNYHHAHDAYLNAVVGTALIKKYPKLESEFVYGDYKVYDVRKMIAKSEQEIGKATAKYFFYSNIMNFFKTEITLANGEIRKRPLIETNGETGEIVWDKGRDFATVRKVLSMPQVNIVKKTEVQTGGFSKESILPKRNSDKLIARKKDWDPKKYGGFDSPTVAYSVLVVAKVEKGKSKKLKSVKELLGITIMERSSFEKNPIDFLEAKGYKEVKKDLIIKLPKYSLFELENGRKRMLASAGELQKGNELALPSKYVNFLYLASHYEKLKGSPEDNEQKQLFVEQHKHYLDEIIEQISEFSKRVILADANLDKVLSAYNKHRDKPIREQAENIIHLFTLTNLGAPAAFKYFDTTIDRKRYTSTKEVLDATLIHQSITGLYETRIDLSQLGGDGGGSSGGGEAAAKGGLLGRDLLTKLKAQIQFSTEGPQVTWEDRPAMCLVLNLEEEYRLHEKPVPPSIDPSWLQLFPMVWAEKAGMGLANQVPPVVVELKSDASPVAVRQYPMSKEAREGIRPHIQRFLDLGILVPCQSPWNTPLLPVKKPGTNDYRPVQDLREVNKRVQDIHPTVPNPYNLLSSLPPSHTWYSVLDLKDAFFCLKLHPNSQPLFAFEWRDPEKGNTGQLTWTRLPQGFKNSPTLFNEALHRDLASFRALNPQVVMLQYVDDLLVAAPTYRDCKEGTRRLLQELSKLGYRVSAKKAQLCREEVTYLGYLLKGGKRWLTPARKATVMKIPTPTTPRQVREFLGTAGFCRLWIPGFASLAAPLYPLTRPKVPFTWTEAHQEAFGRIKEALLSAPALALPDLTKPFALYVDEKEGVARGVLTQTLGPWRRPVAYLSKKLDPVASGWPTCLKAIAAVALLLKDADKLTLGQNVLVIAPHNLESIVRQPPDRWMTNARMTHYQSLLLNERVSFAPPAILNPATLLPVESDDTPIHICSEILAEETGTRPDLRDQPLPGVPAWYTDGSSFIMDGRRQAGAAIVDNKRTVWASNLPEGTSAQKAELIALTQALRLAEGKSINIYTDSRYAFATAHVHGAIYKQRGWLTSAGKDIKNKEEILALLEAIHLPKRVAIIHCPGHQRGTDPVATGNRKADEAAKQAAQSTRILTETTKNAGKRTADGSEFEKRTADGSEFESPKKKAKVE

SEQ ID NO: 7302 - protein, 2096 aa, synthetic construct
MPAAKRVKLDGGDKKYSIGLDIGTNSVGWAVITDEYKVPSKKFKVLGNTDRHSIKKNLIGALLFDSGETAEATRLKRTARRRYTRRKNRICYLQEIFSNEMAKVDDSFFHRLEESFLVEEDKKHERHPIFGNIVDEVAYHEKYPTIYHLRKKLVDSTDKADLRLIYLALAHMIKFRGHFLIEGDLNPDNSDVDKLFIQLVQTYNQLFEENPINASGVDAKAILSARLSKSRRLENLIAQLPGEKKNGLFGNLIALSLGLTPNFKSNFDLAEDAKLQLSKDTYDDDLDNLLAQIGDQYADLFLAAKNLSDAILLSDILRVNTEITKAPLSASMIKRYDEHHQDLTLLKALVRQQLPEKYKEIFFDQSKNGYAGYIDGGASQEEFYKFIKPILEKMDGTEELLVKLNREDLLRKQRTFDNGSIPHQIHLGELHAILRRQEDFYPFLKDNREKIEKILTFRIPYYVGPLARGNSRFAWMTRKSEETITPWNFEEVVDKGASAQSFIERMTNFDKNLPNEKVLPKHSLLYEYFTVYNELTKVKYVTEGMRKPAFLSGEQKKAIVDLLFKTNRKVTVKQLKEDYFKKIECFDSVEISGVEDRFNASLGTYHDLLKIIKDKDFLDNEENEDILEDIVLTLTLFEDREMIEERLKTYAHLFDDKVMKQLKRRRYTGWGRLSRKLINGIRDKQSGKTILDFLKSDGFANRNFMQLIHDDSLTFKEDIQKAQVSGQGDSLHEHIANLAGSPAIKKGILQTVKVVDELVKVMGRHKPENIVIEMARENQTTQKGQKNSRERMKRIEEGIKELGSQILKEHPVENTQLQNEKLYLYYLQNGRDMYVDQELDINRLSDYDVDHIVPQSFLKDDSIDNKVLTRSDKARGKSDNVPSEEVVKKMKNYWRQLLNAKLITQRKFDNLTKAERGGLSELDKAGFIKRQLVETRQITKHVAQILDSRMNTKYDENDKLIREVKVITLKSKLVSDFRKDFQFYKVREINNYHHAHDAYLNAVVGTALIKKYPKLESEFVYGDYKVYDVRKMIAKSEQEIGKATAKYFFYSNIMNFFKTEITLANGEIRKRPLIETNGETGEIVWDKGRDFATVRKVLSMPQVNIVKKTEVQTGGFSKESILPKRNSDKLIARKKDWDPKKYGGFDSPTVAYSVLVVAKVEKGKSKKLKSVKELLGITIMERSSFEKNPIDFLEAKGYKEVKKDLIIKLPKYSLFELENGRKRMLASAGELQKGNELALPSKYVNFLYLASHYEKLKGSPEDNEQKQLFVEQHKHYLDEIIEQISEFSKRVILADANLDKVLSAYNKHRDKPIREQAENIIHLFTLTNLGAPAAFKYFDTTIDRKRYTSTKEVLDATLIHQSITGLYETRIDLSQLGGDGGGSSGGGEAAAKGGTLNIEDEYRLHETSKGPDVPLGSTWLSDFPQAWAETGGMGLAVRQAPLIIPLKATSTPVSIKQYPMSQEARLGIKPHIQRLLDQGILVPCQSPWNTPLLPVKKPGTNDYRPVQDLREVNKRVEDIHPTVPNPYNLLSGLPPSHQWYTVLDLKDAFFCLRLHPTSQSLFAFEWRDPEMGISGQLTWTRLPQGFKNSPTLFNEALHRDLADFRIQHPDLILLQYVDDLLLAATSELDCQQGTRALLQTLGDLGYRASAKKAQICQKQVKYLGYLLKEGQRWLTEARKETVMGQPTPKTPRQLREFLGTAGFCRLWIPGFAEMAAPLYPLTKPGTLFEWGPDQQKAYQEIKQALLTAPALGLPDLTKPFELFVDEKQGYAKGVLTQKLGPWRRPVAYLSKKLDPVAAGWPPCLRMVAAIAVLTKDAGKLTMGQPLVILAPHAVEALVKQPPDRWLSNARMTHYQALLLDTDRVQFGPIVALNPATLLPLPEEGLQHDCLDILAEAHGTRPDLTDQPLPDADHTWYTDGSSFLQEGQRKAGAAVTTETEVVWAKALPAGTSAQRAELIALTQALKMAEGKKLNVYTDSRYAFATAHIHGEIYRRRGWLTSEGKEIKNKDEILALLKALFLPKRLSIIHCPGHQKGNRAEARGNRMADQAAREVATRETPETSTLLAGKRTADGSEFEKRTADGSEFESPKKKAKVE

SEQ ID NO: 7303 - protein, 2090 aa, synthetic construct
MPAAKRVKLDGGDKKYSIGLDIGTNSVGWAVITDEYKVPSKKFKVLGNTDRHSIKKNLIGALLFDSGETAEATRLKRTARRRYTRRKNRICYLQEIFSNEMAKVDDSFFHRLEESFLVEEDKKHERHPIFGNIVDEVAYHEKYPTIYHLRKKLVDSTDKADLRLIYLALAHMIKFRGHFLIEGDLNPDNSDVDKLFIQLVQTYNQLFEENPINASGVDAKAILSARLSKSRRLENLIAQLPGEKKNGLFGNLIALSLGLTPNFKSNFDLAEDAKLQLSKDTYDDDLDNLLAQIGDQYADLFLAAKNLSDAILLSDILRVNTEITKAPLSASMIKRYDEHHQDLTLLKALVRQQLPEKYKEIFFDQSKNGYAGYIDGGASQEEFYKFIKPILEKMDGTEELLVKLNREDLLRKQRTFDNGSIPHQIHLGELHAILRRQEDFYPFLKDNREKIEKILTFRIPYYVGPLARGNSRFAWMTRKSEETITPWNFEEVVDKGASAQSFIERMTNFDKNLPNEKVLPKHSLLYEYFTVYNELTKVKYVTEGMRKPAFLSGEQKKAIVDLLFKTNRKVTVKQLKEDYFKKIECFDSVEISGVEDRFNASLGTYHDLLKIIKDKDFLDNEENEDILEDIVLTLTLFEDREMIEERLKTYAHLFDDKVMKQLKRRRYTGWGRLSRKLINGIRDKQSGKTILDFLKSDGFANRNFMQLIHDDSLTFKEDIQKAQVSGQGDSLHEHIANLAGSPAIKKGILQTVKVVDELVKVMGRHKPENIVIEMARENQTTQKGQKNSRERMKRIEEGIKELGSQILKEHPVENTQLQNEKLYLYYLQNGRDMYVDQELDINRLSDYDVDHIVPQSFLKDDSIDNKVLTRSDKARGKSDNVPSEEVVKKMKNYWRQLLNAKLITQRKFDNLTKAERGGLSELDKAGFIKRQLVETRQITKHVAQILDSRMNTKYDENDKLIREVKVITLKSKLVSDFRKDFQFYKVREINNYHHAHDAYLNAVVGTALIKKYPKLESEFVYGDYKVYDVRKMIAKSEQEIGKATAKYFFYSNIMNFFKTEITLANGEIRKRPLIETNGETGEIVWDKGRDFATVRKVLSMPQVNIVKKTEVQTGGFSKESILPKRNSDKLIARKKDWDPKKYGGFDSPTVAYSVLVVAKVEKGKSKKLKSVKELLGITIMERSSFEKNPIDFLEAKGYKEVKKDLIIKLPKYSLFELENGRKRMLASAGELQKGNELALPSKYVNFLYLASHYEKLKGSPEDNEQKQLFVEQHKHYLDEIIEQISEFSKRVILADANLDKVLSAYNKHRDKPIREQAENIIHLFTLTNLGAPAAFKYFDTTIDRKRYTSTKEVLDATLIHQSITGLYETRIDLSQLGGDGGGSSGGGEAAAKGGTLQLDDEYRLYSPLVKPDQNIQFWLEQFPQAWAETAGMGLAKQVPPQVIQLKASATPVSVRQYPLSKEAQEGIRPHVQRLIQQGILVPVQSPWNTPLLPVRKPGTNDYRPVQDLREVNKRVQDIHPTVPNPYNLLCALPPQRSWYTVLDLKDAFFCLRLHPTSQPLFAFEWRDPGTGRTGQLTWTRLPQGFKNSPTIFDEALHRDLANFRIQHPQVTLLQYVDDLLLAGATKQDCLEGTKALLLELSDLGYRASAKKAQICRREVTYLGYSLRDGQRWLTEARKKTVVQIPAPTTAKQVREFLGTAGFCRLWIPGFATLAAPLYPLTKEKGEFSWAPEHQKAFDAIKKALLSAPALALPDVTKPFTLYVDERKGVARGVLTQTLGPWRRPVAYLSKKLDPVASGWPVCLKAIAAVAILVKDADKLTLGQNITVIAPHALENIVRQPPDRWMTNARMTHYQSLLLTERVTFAPPAALNPATLLPEETDEPVTHDCHQLLIEETGVRKDLTDIPLTGEVLTWFTDGSSYVVEGKRMAGAAVVDGTRTIWASSLPEGTSAQKAELMALTQALRLAEGKSINIYTDSRYAFATAHVHGAIYKQRGLLTSAGREIKNKEEILSLLEALHLPKRLAIIHCPGHQKAKDPISRGNQMADRVAKQAAQGVNLLAGKRTADGSEFEKRTADGSEFESPKKKAKVE

SEQ ID NO: 7304 - protein, 2087 aa, synthetic construct
MPAAKRVKLDGGDKKYSIGLDIGTNSVGWAVITDEYKVPSKKFKVLGNTDRHSIKKNLIGALLFDSGETAEATRLKRTARRRYTRRKNRICYLQEIFSNEMAKVDDSFFHRLEESFLVEEDKKHERHPIFGNIVDEVAYHEKYPTIYHLRKKLVDSTDKADLRLIYLALAHMIKFRGHFLIEGDLNPDNSDVDKLFIQLVQTYNQLFEENPINASGVDAKAILSARLSKSRRLENLIAQLPGEKKNGLFGNLIALSLGLTPNFKSNFDLAEDAKLQLSKDTYDDDLDNLLAQIGDQYADLFLAAKNLSDAILLSDILRVNTEITKAPLSASMIKRYDEHHQDLTLLKALVRQQLPEKYKEIFFDQSKNGYAGYIDGGASQEEFYKFIKPILEKMDGTEELLVKLNREDLLRKQRTFDNGSIPHQIHLGELHAILRRQEDFYPFLKDNREKIEKILTFRIPYYVGPLARGNSRFAWMTRKSEETITPWNFEEVVDKGASAQSFIERMTNFDKNLPNEKVLPKHSLLYEYFTVYNELTKVKYVTEGMRKPAFLSGEQKKAIVDLLFKTNRKVTVKQLKEDYFKKIECFDSVEISGVEDRFNASLGTYHDLLKIIKDKDFLDNEENEDILEDIVLTLTLFEDREMIEERLKTYAHLFDDKVMKQLKRRRYTGWGRLSRKLINGIRDKQSGKTILDFLKSDGFANRNFMQLIHDDSLTFKEDIQKAQVSGQGDSLHEHIANLAGSPAIKKGILQTVKVVDELVKVMGRHKPENIVIEMARENQTTQKGQKNSRERMKRIEEGIKELGSQILKEHPVENTQLQNEKLYLYYLQNGRDMYVDQELDINRLSDYDVDHIVPQSFLKDDSIDNKVLTRSDKARGKSDNVPSEEVVKKMKNYWRQLLNAKLITQRKFDNLTKAERGGLSELDKAGFIKRQLVETRQITKHVAQILDSRMNTKYDENDKLIREVKVITLKSKLVSDFRKDFQFYKVREINNYHHAHDAYLNAVVGTALIKKYPKLESEFVYGDYKVYDVRKMIAKSEQEIGKATAKYFFYSNIMNFFKTEITLANGEIRKRPLIETNGETGEIVWDKGRDFATVRKVLSMPQVNIVKKTEVQTGGFSKESILPKRNSDKLIARKKDWDPKKYGGFDSPTVAYSVLVVAKVEKGKSKKLKSVKELLGITIMERSSFEKNPIDFLEAKGYKEVKKDLIIKLPKYSLFELENGRKRMLASAGELQKGNELALPSKYVNFLYLASHYEKLKGSPEDNEQKQLFVEQHKHYLDEIIEQISEFSKRVILADANLDKVLSAYNKHRDKPIREQAENIIHLFTLTNLGAPAAFKYFDTTIDRKRYTSTKEVLDATLIHQSITGLYETRIDLSQLGGDGGGSSGGGEAAAKGGIPWLMKKPLQLTTLVPLQEYEERLLKQTMLTGSYKEKLQSLFLKYDALWQHWENQVGHRRIKPHHIATGTVNPRPQKQYPINPKAKASIQTVINDLLKQGVLIQQNSIMNTPVYPVPKPDGKWRMVLDYREVNKTIPLIAAQNQHSAGILSSIFRGKYKTTLDLSNGFWAHSITPESYWLTAFTWLGQQYCWTRLPQGFLNSPALFNADVVDLLKEVPNVQVYVDDIYISHDDPREHLEQLEKVFSLLLNAGYVVSLKKSEIAQHEVEFLGFNITKEGRGLTETFKQKLLNITPPRDLKQLQSILGKLNFARNFIPNFSELVKPLYNIIATAPGKYITWTTDNSQQLQNIISMLNSAENLEERNPEVRLIMKVNTSPSAGYIRFYNEFAKRPIMYLNYVYTKAEVKFTNTEKLLTTIHKGLIKALDLGMGQEILVYSPIVSMTKIQKTPLPERKALPIRWITWMSYLEDPRIQFHYDKTLPELQQVPTVTDDIIAKIKHPSEFSMVFYTDGSAIKHPNVNKSHNAGMGIAQVQFKPEFTVINTWSIPLGDHTAQLAEVAAVEFACKKALKIDGPVLIVTDSFYVAESVNKELPYWQSNGFFNNKKKPLKHVSKWKSIADCIQLKPDIIIIHEKGHQPTASTFHTEGNNLADKLATQGSYVVNAGKRTADGSEFEKRTADGSEFESPKKKAKVE

SEQ ID NO: 7305 - protein, 2176 aa, synthetic construct
MPAAKRVKLDGGDKKYSIGLDIGTNSVGWAVITDEYKVPSKKFKVLGNTDRHSIKKNLIGALLFDSGETAEATRLKRTARRRYTRRKNRICYLQEIFSNEMAKVDDSFFHRLEESFLVEEDKKHERHPIFGNIVDEVAYHEKYPTIYHLRKKLVDSTDKADLRLIYLALAHMIKFRGHFLIEGDLNPDNSDVDKLFIQLVQTYNQLFEENPINASGVDAKAILSARLSKSRRLENLIAQLPGEKKNGLFGNLIALSLGLTPNFKSNFDLAEDAKLQLSKDTYDDDLDNLLAQIGDQYADLFLAAKNLSDAILLSDILRVNTEITKAPLSASMIKRYDEHHQDLTLLKALVRQQLPEKYKEIFFDQSKNGYAGYIDGGASQEEFYKFIKPILEKMDGTEELLVKLNREDLLRKQRTFDNGSIPHQIHLGELHAILRRQEDFYPFLKDNREKIEKILTFRIPYYVGPLARGNSRFAWMTRKSEETITPWNFEEVVDKGASAQSFIERMTNFDKNLPNEKVLPKHSLLYEYFTVYNELTKVKYVTEGMRKPAFLSGEQKKAIVDLLFKTNRKVTVKQLKEDYFKKIECFDSVEISGVEDRFNASLGTYHDLLKIIKDKDFLDNEENEDILEDIVLTLTLFEDREMIEERLKTYAHLFDDKVMKQLKRRRYTGWGRLSRKLINGIRDKQSGKTILDFLKSDGFANRNFMQLIHDDSLTFKEDIQKAQVSGQGDSLHEHIANLAGSPAIKKGILQTVKVVDELVKVMGRHKPENIVIEMARENQTTQKGQKNSRERMKRIEEGIKELGSQILKEHPVENTQLQNEKLYLYYLQNGRDMYVDQELDINRLSDYDVDHIVPQSFLKDDSIDNKVLTRSDKARGKSDNVPSEEVVKKMKNYWRQLLNAKLITQRKFDNLTKAERGGLSELDKAGFIKRQLVETRQITKHVAQILDSRMNTKYDENDKLIREVKVITLKSKLVSDFRKDFQFYKVREINNYHHAHDAYLNAVVGTALIKKYPKLESEFVYGDYKVYDVRKMIAKSEQEIGKATAKYFFYSNIMNFFKTEITLANGEIRKRPLIETNGETGEIVWDKGRDFATVRKVLSMPQVNIVKKTEVQTGGFSKESILPKRNSDKLIARKKDWDPKKYGGFDSPTVAYSVLVVAKVEKGKSKKLKSVKELLGITIMERSSFEKNPIDFLEAKGYKEVKKDLIIKLPKYSLFELENGRKRMLASAGELQKGNELALPSKYVNFLYLASHYEKLKGSPEDNEQKQLFVEQHKHYLDEIIEQISEFSKRVILADANLDKVLSAYNKHRDKPIREQAENIIHLFTLTNLGAPAAFKYFDTTIDRKRYTSTKEVLDATLIHQSITGLYETRIDLSQLGGDGGGSSGGGEAAAKGGMDPLQLLQPLEAEIKGTKLKAHWNSGATITCVPQAFLEEEVPIKNIWIKTIHGEKEQPVYYLTFKIQGRKVEAEVISSPYDYILVSPSDIPWLMKKPLQLTTLVPLQEYEERLLKQTMLTGSYKEKLQSLFLKYDALWQHWENQVGHRRIKPHHIATGTVNPRPQKQYPINPKAKASIQTVINDLLKQGVLIQQNSIMNTPVYPVPKPDGKWRMVLDYREVNKTIPLIAAQNQHSAGILSSIFRGKYKTTLDLSNGFWAHSITPESYWLTAFTWLGQQYCWTRLPQGFLNSPALFNADVVDLLKEVPNVQVYVDDIYISHDDPREHLEQLEKVFSLLLNAGYVVSLKKSEIAQHEVEFLGFNITKEGRGLTETFKQKLLNITPPRDLKQLQSILGLLNFARNFIPNFSELVKPLYNIIATAPGKYITWTTDNSQQLQNIISMLNSAENLEERNPEVRLIMKVNTSPSAGYIRFYNEFAKRPIMYLNYVYTKAEVKFTNTEKLLTTIHKGLIKALDLGMGQEILVYSPIVSMTKIQKTPLPERKALPIRWITWMSYLEDPRIQFHYDKTLPELQQVPTVTDDIIAKIKHPSEFSMVFYTDGSAIKHPNVNKSHNAGMGIAQVQFKPEFTVINTWSIPLGDHTAQLAEVAAVEFACKKALKIDGPVLIVTDSFYVAESVNKELPYWQSNGFFNNKKKPLKHVSKWKSIADCIQLKPDIIIIHEKGHQPTASTFHTEGNNLADKLATQGSYVVNAGKRTADGSEFEKRTADGSEFESPKKKAKVE

SEQ ID NO: 7306 - protein, 2094 aa, synthetic construct
MPAAKRVKLDGGDKKYSIGLDIGTNSVGWAVITDEYKVPSKKFKVLGNTDRHSIKKNLIGALLFDSGETAEATRLKRTARRRYTRRKNRICYLQEIFSNEMAKVDDSFFHRLEESFLVEEDKKHERHPIFGNIVDEVAYHEKYPTIYHLRKKLVDSTDKADLRLIYLALAHMIKFRGHFLIEGDLNPDNSDVDKLFIQLVQTYNQLFEENPINASGVDAKAILSARLSKSRRLENLIAQLPGEKKNGLFGNLIALSLGLTPNFKSNFDLAEDAKLQLSKDTYDDDLDNLLAQIGDQYADLFLAAKNLSDAILLSDILRVNTEITKAPLSASMIKRYDEHHQDLTLLKALVRQQLPEKYKEIFFDQSKNGYAGYIDGGASQEEFYKFIKPILEKMDGTEELLVKLNREDLLRKQRTFDNGSIPHQIHLGELHAILRRQEDFYPFLKDNREKIEKILTFRIPYYVGPLARGNSRFAWMTRKSEETITPWNFEEVVDKGASAQSFIERMTNFDKNLPNEKVLPKHSLLYEYFTVYNELTKVKYVTEGMRKPAFLSGEQKKAIVDLLFKTNRKVTVKQLKEDYFKKIECFDSVEISGVEDRFNASLGTYHDLLKIIKDKDFLDNEENEDILEDIVLTLTLFEDREMIEERLKTYAHLFDDKVMKQLKRRRYTGWGRLSRKLINGIRDKQSGKTILDFLKSDGFANRNFMQLIHDDSLTFKEDIQKAQVSGQGDSLHEHIANLAGSPAIKKGILQTVKVVDELVKVMGRHKPENIVIEMARENQTTQKGQKNSRERMKRIEEGIKELGSQILKEHPVENTQLQNEKLYLYYLQNGRDMYVDQELDINRLSDYDVDHIVPQSFLKDDSIDNKVLTRSDKARGKSDNVPSEEVVKKMKNYWRQLLNAKLITQRKFDNLTKAERGGLSELDKAGFIKRQLVETRQITKHVAQILDSRMNTKYDENDKLIREVKVITLKSKLVSDFRKDFQFYKVREINNYHHAHDAYLNAVVGTALIKKYPKLESEFVYGDYKVYDVRKMIAKSEQEIGKATAKYFFYSNIMNFFKTEITLANGEIRKRPLIETNGETGEIVWDKGRDFATVRKVLSMPQVNIVKKTEVQTGGFSKESILPKRNSDKLIARKKDWDPKKYGGFDSPTVAYSVLVVAKVEKGKSKKLKSVKELLGITIMERSSFEKNPIDFLEAKGYKEVKKDLIIKLPKYSLFELENGRKRMLASAGELQKGNELALPSKYVNFLYLASHYEKLKGSPEDNEQKQLFVEQHKHYLDEIIEQISEFSKRVILADANLDKVLSAYNKHRDKPIREQAENIIHLFTLTNLGAPAAFKYFDTTIDRKRYTSTKEVLDATLIHQSITGLYETRIDLSQLGGDGGGSSGGGEAAAKGGVLNLEEEYRLHEKPVPSSIDPSWLQLFPTVWAERAGMGLANQVPPVVVELRSGASPVAVRQYPMSKEAREGIRPHIQRFLDLGVLVPCQSPWNTPLLPVKKPGTNDYRPVQDLREINKRVQDIHPTVPNPYNLLSSLPPSHTWYSVLDLKDAFFCLKLHPNSQPLFAFEWRDPEKGNTGQLTWTRLPQGFKNSPTLFNEALHRDLAPFRALNPQVVLLQYVDDLLVAAPTYRDCKEGTQKLLQELSKLGYRVSAKKAQLCQKEVTYLGYLLKEGKRWLTPARKATVMKIPPPTTPRQVREFLGTAGFCRLWIPGFASLAAPLYPLTKPSIPFIWTEEHQKAFDRIKEALLSAPALALPDLTKPFTLYVDERAGVARGVLTQTLGPWRRPVAYLSKKLDPVASGWPTCLKAVAAVALLLKDADKLTLGQNVTVIASHSLESIVRQPPDRWMTNARMTHYQSLLLNERVSFAPPAVLNPATLLPVESEATPVHRCSEILAEETGTRRDLKDQPLPGVPAWYTDGSSFIAEGKRRAGAAIVDGKRTVWASSLPEGTSAQKAELVALTQALRLAEGKDINIYTDSRYAFATAHIHGAIYKQRGWLTSAGKDIKNKEEILALLEAIHLPKRVAIIHCPGHQKGNDPVATGNRRADEAAKQAALSTRVLAETTKPAGKRTADGSEFEKRTADGSEFESPKKKAKVE

SEQ ID NO: 7307 - protein, 2102 aa, synthetic construct
MPAAKRVKLDGGDKKYSIGLDIGTNSVGWAVITDEYKVPSKKFKVLGNTDRHSIKKNLIGALLFDSGETAEATRLKRTARRRYTRRKNRICYLQEIFSNEMAKVDDSFFHRLEESFLVEEDKKHERHPIFGNIVDEVAYHEKYPTIYHLRKKLVDSTDKADLRLIYLALAHMIKFRGHFLIEGDLNPDNSDVDKLFIQLVQTYNQLFEENPINASGVDAKAILSARLSKSRRLENLIAQLPGEKKNGLFGNLIALSLGLTPNFKSNFDLAEDAKLQLSKDTYDDDLDNLLAQIGDQYADLFLAAKNLSDAILLSDILRVNTEITKAPLSASMIKRYDEHHQDLTLLKALVRQQLPEKYKEIFFDQSKNGYAGYIDGGASQEEFYKFIKPILEKMDGTEELLVKLNREDLLRKQRTFDNGSIPHQIHLGELHAILRRQEDFYPFLKDNREKIEKILTFRIPYYVGPLARGNSRFAWMTRKSEETITPWNFEEVVDKGASAQSFIERMTNFDKNLPNEKVLPKHSLLYEYFTVYNELTKVKYVTEGMRKPAFLSGEQKKAIVDLLFKTNRKVTVKQLKEDYFKKIECFDSVEISGVEDRFNASLGTYHDLLKIIKDKDFLDNEENEDILEDIVLTLTLFEDREMIEERLKTYAHLFDDKVMKQLKRRRYTGWGRLSRKLINGIRDKQSGKTILDFLKSDGFANRNFMQLIHDDSLTFKEDIQKAQVSGQGDSLHEHIANLAGSPAIKKGILQTVKVVDELVKVMGRHKPENIVIEMARENQTTQKGQKNSRERMKRIEEGIKELGSQILKEHPVENTQLQNEKLYLYYLQNGRDMYVDQELDINRLSDYDVDHIVPQSFLKDDSIDNKVLTRSDKARGKSDNVPSEEVVKKMKNYWRQLLNAKLITQRKFDNLTKAERGGLSELDKAGFIKRQLVETRQITKHVAQILDSRMNTKYDENDKLIREVKVITLKSKLVSDFRKDFQFYKVREINNYHHAHDAYLNAVVGTALIKKYPKLESEFVYGDYKVYDVRKMIAKSEQEIGKATAKYFFYSNIMNFFKTEITLANGEIRKRPLIETNGETGEIVWDKGRDFATVRKVLSMPQVNIVKKTEVQTGGFSKESILPKRNSDKLIARKKDWDPKKYGGFDSPTVAYSVLVVAKVEKGKSKKLKSVKELLGITIMERSSFEKNPIDFLEAKGYKEVKKDLIIKLPKYSLFELENGRKRMLASAGELQKGNELALPSKYVNFLYLASHYEKLKGSPEDNEQKQLFVEQHKHYLDEIIEQISEFSKRVILADANLDKVLSAYNKHRDKPIREQAENIIHLFTLTNLGAPAAFKYFDTTIDRKRYTSTKEVLDATLIHQSITGLYETRIDLSQLGGDGGGSSEAAAKGGGGGTVSLQDEHRLFDIPVTTSLPDVWLQDFPQAWAETGGLGRAKCQAPIIIDLKPTAVPVSIKQYPMSLEAHMGIRQHIIKFLELGVLRPCRSPWNTPLLPVKKPGTQDYRPVQDLREINKRTVDIHPTVPNPYNLLSTLKPDYSWYTVLDLKDAFFCLPLAPQSQELFAFEWKDPERGISGQLTWTRLPQGFKNSPTLFNEALHRDLTDFRTQHPEVTLLQYVDDLLLAAPTKKACTQGTRHLLQELGEKGYRASAKKAQICQTKVTYLGYILSEGKRWLTPGRIETVARIPPPRNPREVREFLGTAGFCRLWIPGFAELAAPLYALTKPSTPFTWQTEHQLAFEALKKALLSAPALGLPDTSKPFTLFLDERQGIAKGVLTQKLGPWKRPVAYLSKKLDPVAAGWPPCLRIMAATAMLVKDSAKLTLGQPLTVITPHTLEAIVRQPPDRWITNARLTHYQALLLDTDRVQFGPPVTLNPATLLPVPENQPSPHDCRQVLAETHGTREDLKDQELPDADHTWYTDGSSYLDSGTRRAGAAVVDGHNTIWAQSLPPGTSAQKAELIALTKALELSKGKKANIYTDSRYAFATAHTHGSIYERRGWLTSEGKEIKNKAEIIALLKALFLPQEVAIIHCPGHQKGQDPVAVGNRQADRVARQAAMAEVLTLATEPDNTSHITAGKRTADGSEFEKRTADGSEFESPKKKAKVE

SEQ ID NO: 7308 - protein, 2173 aa, synthetic construct
MPAAKRVKLDGGDKKYSIGLDIGTNSVGWAVITDEYKVPSKKFKVLGNTDRHSIKKNLIGALLFDSGETAEATRLKRTARRRYTRRKNRICYLQEIFSNEMAKVDDSFFHRLEESFLVEEDKKHERHPIFGNIVDEVAYHEKYPTIYHLRKKLVDSTDKADLRLIYLALAHMIKFRGHFLIEGDLNPDNSDVDKLFIQLVQTYNQLFEENPINASGVDAKAILSARLSKSRRLENLIAQLPGEKKNGLFGNLIALSLGLTPNFKSNFDLAEDAKLQLSKDTYDDDLDNLLAQIGDQYADLFLAAKNLSDAILLSDILRVNTEITKAPLSASMIKRYDEHHQDLTLLKALVRQQLPEKYKEIFFDQSKNGYAGYIDGGASQEEFYKFIKPILEKMDGTEELLVKLNREDLLRKQRTFDNGSIPHQIHLGELHAILRRQEDFYPFLKDNREKIEKILTFRIPYYVGPLARGNSRFAWMTRKSEETITPWNFEEVVDKGASAQSFIERMTNFDKNLPNEKVLPKHSLLYEYFTVYNELTKVKYVTEGMRKPAFLSGEQKKAIVDLLFKTNRKVTVKQLKEDYFKKIECFDSVEISGVEDRFNASLGTYHDLLKIIKDKDFLDNEENEDILEDIVLTLTLFEDREMIEERLKTYAHLFDDKVMKQLKRRRYTGWGRLSRKLINGIRDKQSGKTILDFLKSDGFANRNFMQLIHDDSLTFKEDIQKAQVSGQGDSLHEHIANLAGSPAIKKGILQTVKVVDELVKVMGRHKPENIVIEMARENQTTQKGQKNSRERMKRIEEGIKELGSQILKEHPVENTQLQNEKLYLYYLQNGRDMYVDQELDINRLSDYDVDHIVPQSFLKDDSIDNKVLTRSDKARGKSDNVPSEEVVKKMKNYWRQLLNAKLITQRKFDNLTKAERGGLSELDKAGFIKRQLVETRQITKHVAQILDSRMNTKYDENDKLIREVKVITLKSKLVSDFRKDFQFYKVREINNYHHAHDAYLNAVVGTALIKKYPKLESEFVYGDYKVYDVRKMIAKSEQEIGKATAKYFFYSNIMNFFKTEITLANGEIRKRPLIETNGETGEIVWDKGRDFATVRKVLSMPQVNIVKKTEVQTGGFSKESILPKRNSDKLIARKKDWDPKKYGGFDSPTVAYSVLVVAKVEKGKSKKLKSVKELLGITIMERSSFEKNPIDFLEAKGYKEVKKDLIIKLPKYSLFELENGRKRMLASAGELQKGNELALPSKYVNFLYLASHYEKLKGSPEDNEQKQLFVEQHKHYLDEIIEQISEFSKRVILADANLDKVLSAYNKHRDKPIREQAENIIHLFTLTNLGAPAAFKYFDTTIDRKRYTSTKEVLDATLIHQSITGLYETRIDLSQLGGDGGGSSEAAAKGGGGGMDLLKPLTVERKGVKIKGYWNSQADITCVPKDLLQGEEPVRQQNVTTIHGTQEGDVYYVNLKIDGRRINTEVIGTTLDYAIITPGDVPWILKKPLELTIKLDLEEQQGTLLNNSILSKKGKEELKQLFEKYSALWQSWENQVGHRRIRPHKIATGTVKPTPQKQYHINPKAKPDIQIVINDLLKQGVLIQKESTMNTPVYPVPKPNGRWRMVLDYRAVNKVTPLIAVQNQHSYGILGSLFKGRYKTTIDLSNGFWAHPIVPEDYWITAFTWQGKQYCWTVLPQGFLNSPGLFNGDVVDLLQGIPNVEVYVDDVYISHDSEKEHLEYLDILFNRLKEAGYIISLKKSNIANSIVDFLGFQITNEGRGLTDTFKEKLENITAPTTLKQLQSILGKLNFARNFIPDFTELIAPLYALIPKSPKNYVPWQIEHSTTLETLITKLNGAEYLQGRKGDKTLIMKVNASYTTGYIRYYNEGEKKPISYVSIVFSKTELKFTELEKLLTTVHKGLLKALDLSMGQNIHVYSPIVSMQNIQKTPQTAKKALASRWLSWLSYLEDPRIRFFYDPQMPALKDLPAVDTGKDNKKHPSNFQHIFYTDGSAITSPTKEGHLNAGMGIVYFINKDGNLQKQQEWSISLGNHTAQFAEIAAFEFALKKCLPLGGNILVVTDSNYVAKAYNEELDVWASNGFVNNRKKPLKHISKWKSVADLKRLRPDVVVTHEPGHQKLDSSPHAYGNNLADQLATQASFKVHAGKRTADGSEFEKRTADGSEFESPKKKAKVE

SEQ ID NO: 7309 - protein, 2095 aa, synthetic construct
MPAAKRVKLDGGDKKYSIGLDIGTNSVGWAVITDEYKVPSKKFKVLGNTDRHSIKKNLIGALLFDSGETAEATRLKRTARRRYTRRKNRICYLQEIFSNEMAKVDDSFFHRLEESFLVEEDKKHERHPIFGNIVDEVAYHEKYPTIYHLRKKLVDSTDKADLRLIYLALAHMIKFRGHFLIEGDLNPDNSDVDKLFIQLVQTYNQLFEENPINASGVDAKAILSARLSKSRRLENLIAQLPGEKKNGLFGNLIALSLGLTPNFKSNFDLAEDAKLQLSKDTYDDDLDNLLAQIGDQYADLFLAAKNLSDAILLSDILRVNTEITKAPLSASMIKRYDEHHQDLTLLKALVRQQLPEKYKEIFFDQSKNGYAGYIDGGASQEEFYKFIKPILEKMDGTEELLVKLNREDLLRKQRTFDNGSIPHQIHLGELHAILRRQEDFYPFLKDNREKIEKILTFRIPYYVGPLARGNSRFAWMTRKSEETITPWNFEEVVDKGASAQSFIERMTNFDKNLPNEKVLPKHSLLYEYFTVYNELTKVKYVTEGMRKPAFLSGEQKKAIVDLLFKTNRKVTVKQLKEDYFKKIECFDSVEISGVEDRFNASLGTYHDLLKIIKDKDFLDNEENEDILEDIVLTLTLFEDREMIEERLKTYAHLFDDKVMKQLKRRRYTGWGRLSRKLINGIRDKQSGKTILDFLKSDGFANRNFMQLIHDDSLTFKEDIQKAQVSGQGDSLHEHIANLAGSPAIKKGILQTVKVVDELVKVMGRHKPENIVIEMARENQTTQKGQKNSRERMKRIEEGIKELGSQILKEHPVENTQLQNEKLYLYYLQNGRDMYVDQELDINRLSDYDVDHIVPQSFLKDDSIDNKVLTRSDKARGKSDNVPSEEVVKKMKNYWRQLLNAKLITQRKFDNLTKAERGGLSELDKAGFIKRQLVETRQITKHVAQILDSRMNTKYDENDKLIREVKVITLKSKLVSDFRKDFQFYKVREINNYHHAHDAYLNAVVGTALIKKYPKLESEFVYGDYKVYDVRKMIAKSEQEIGKATAKYFFYSNIMNFFKTEITLANGEIRKRPLIETNGETGEIVWDKGRDFATVRKVLSMPQVNIVKKTEVQTGGFSKESILPKRNSDKLIARKKDWDPKKYGGFDSPTVAYSVLVVAKVEKGKSKKLKSVKELLGITIMERSSFEKNPIDFLEAKGYKEVKKDLIIKLPKYSLFELENGRKRMLASAGELQKGNELALPSKYVNFLYLASHYEKLKGSPEDNEQKQLFVEQHKHYLDEIIEQISEFSKRVILADANLDKVLSAYNKHRDKPIREQAENIIHLFTLTNLGAPAAFKYFDTTIDRKRYTSTKEVLDATLIHQSITGLYETRIDLSQLGGDGGGSSEAAAKGGGGGTLQLEEEYRLFEPESTQKQEMDIWLKNFPQAWAETGGMGTAHCQAPVLIQLKATATPISIRQYPMPHEAYQGIKPHIRRMLDQGILKPCQSPWNTPLLPVKKPGTEDYRPVQDLREVNKRVEDIHPTVPNPYNLLSTLPPSHPWYTVLDLKDAFFCLRLHSESQLLFAFEWRDPEIGLSGQLTWTRLPQGFKNSPTLFNEALHSDLADFRVRYPALVLLQYVDDLLLAAATRTECLEGTKALLETLGNKGYRASAKKAQICLQEVTYLGYSLKDGQRWLTKARKEAILSIPVPKNSRQVREFLGKAGYCRLFIPGFAELAAPLYPLTRPGTLFQWGTEQQLAFEDIKKALLSSPALGLPDITKPFELFIDENSGFAKGVLVQKLGPWKRPVAYLSKKLDTVASGWPPCLRMVAAIAILVKDAGKLTLGQPLTILTSHPVEALVRQPPNKWLSNARMTHYQAMLLDAERVHFGPTVSLNPATLLPLPSGGNHHDCLQILAETHGTRPDLTDQPLPDADLTWYTDGSSFIRNGEREAGAAVTTESEVIWAAPLPPGTSAQRAELIALTQALKMAEGKKLTVYTDSRYAFATTHVHGEIYRRRGWLTSEGKEIKNKNEILALLEALFLPKRLSIIHCPGHQKGDSPQAKGNRLADDTAKKAATETHSSLTVLPAGKRTADGSEFEKRTADGSEFESPKKKAKVE

SEQ ID NO: 7310 - protein, 2094 aa, synthetic construct
MPAAKRVKLDGGDKKYSIGLDIGTNSVGWAVITDEYKVPSKKFKVLGNTDRHSIKKNLIGALLFDSGETAEATRLKRTARRRYTRRKNRICYLQEIFSNEMAKVDDSFFHRLEESFLVEEDKKHERHPIFGNIVDEVAYHEKYPTIYHLRKKLVDSTDKADLRLIYLALAHMIKFRGHFLIEGDLNPDNSDVDKLFIQLVQTYNQLFEENPINASGVDAKAILSARLSKSRRLENLIAQLPGEKKNGLFGNLIALSLGLTPNFKSNFDLAEDAKLQLSKDTYDDDLDNLLAQIGDQYADLFLAAKNLSDAILLSDILRVNTEITKAPLSASMIKRYDEHHQDLTLLKALVRQQLPEKYKEIFFDQSKNGYAGYIDGGASQEEFYKFIKPILEKMDGTEELLVKLNREDLLRKQRTFDNGSIPHQIHLGELHAILRRQEDFYPFLKDNREKIEKILTFRIPYYVGPLARGNSRFAWMTRKSEETITPWNFEEVVDKGASAQSFIERMTNFDKNLPNEKVLPKHSLLYEYFTVYNELTKVKYVTEGMRKPAFLSGEQKKAIVDLLFKTNRKVTVKQLKEDYFKKIECFDSVEISGVEDRFNASLGTYHDLLKIIKDKDFLDNEENEDILEDIVLTLTLFEDREMIEERLKTYAHLFDDKVMKQLKRRRYTGWGRLSRKLINGIRDKQSGKTILDFLKSDGFANRNFMQLIHDDSLTFKEDIQKAQVSGQGDSLHEHIANLAGSPAIKKGILQTVKVVDELVKVMGRHKPENIVIEMARENQTTQKGQKNSRERMKRIEEGIKELGSQILKEHPVENTQLQNEKLYLYYLQNGRDMYVDQELDINRLSDYDVDHIVPQSFLKDDSIDNKVLTRSDKARGKSDNVPSEEVVKKMKNYWRQLLNAKLITQRKFDNLTKAERGGLSELDKAGFIKRQLVETRQITKHVAQILDSRMNTKYDENDKLIREVKVITLKSKLVSDFRKDFQFYKVREINNYHHAHDAYLNAVVGTALIKKYPKLESEFVYGDYKVYDVRKMIAKSEQEIGKATAKYFFYSNIMNFFKTEITLANGEIRKRPLIETNGETGEIVWDKGRDFATVRKVLSMPQVNIVKKTEVQTGGFSKESILPKRNSDKLIARKKDWDPKKYGGFDSPTVAYSVLVVAKVEKGKSKKLKSVKELLGITIMERSSFEKNPIDFLEAKGYKEVKKDLIIKLPKYSLFELENGRKRMLASAGELQKGNELALPSKYVNFLYLASHYEKLKGSPEDNEQKQLFVEQHKHYLDEIIEQISEFSKRVILADANLDKVLSAYNKHRDKPIREQAENIIHLFTLTNLGAPAAFKYFDTTIDRKRYTSTKEVLDATLIHQSITGLYETRIDLSQLGGDGGGSSEAAAKGGGGGVLNLEEEYRLHEKPVPSSIDPSWLQLFPTVWAERAGMGLANQVPPVVVELRSGASPVAVRQYPMSKEAREGIRPHIQKFLDLGVLVPCRSPWNTPLLPVKKPGTNDYRPVQDLREINKRVQDIHPTVPNPYNLLSSLPPSYTWYSVLDLKDAFFCLRLHPNSQPLFAFEWKDPEKGNTGQLTWTRLPQGFKNSPTLFNEALHRDLAPFRALNPQVVLLQYVDDLLVAAPTYEDCKKGTQKLLQELSKLGYRVSAKKAQLCQREVTYLGYLLKEGKRWLTPARKATVMKIPVPTTPRQVREFLGKAGFCRLFIPGFASLAAPLYPLTKPSIPFIWTEEHQQAFDHIKKALLSAPALALPDLTKPFTLYIDERAGVARGVLTQTLGPWRRPVAYLSKKLDPVASGWPTCLKAVAAVALLLKDADKLTLGQNVTVIASHSLESIVRQPPDRWMTNARMTHYQSLLLNERVSFAPPAVLNPATLLPVESEATPVHRCSEILAEETGTRRDLEDQPLPGVPTWYTDGSSFITEGKRRAGAPIVDGKRTVWASSLPEGTSAQKAELVALTQALRLAEGKNINIYTDSRYAFATAHIHGAIYKQRGWLTSAGKDIKNKEEILALLEAIHLPRRVAIIHCPGHQRGSNPVATGNRRADEAAKQAALSTRVLAGTTKPAGKRTADGSEFEKRTADGSEFESPKKKAKVE

SEQ ID NO: 7311 - protein, 2218 aa, synthetic construct
MPAAKRVKLDGGDKKYSIGLDIGTNSVGWAVITDEYKVPSKKFKVLGNTDRHSIKKNLIGALLFDSGETAEATRLKRTARRRYTRRKNRICYLQEIFSNEMAKVDDSFFHRLEESFLVEEDKKHERHPIFGNIVDEVAYHEKYPTIYHLRKKLVDSTDKADLRLIYLALAHMIKFRGHFLIEGDLNPDNSDVDKLFIQLVQTYNQLFEENPINASGVDAKAILSARLSKSRRLENLIAQLPGEKKNGLFGNLIALSLGLTPNFKSNFDLAEDAKLQLSKDTYDDDLDNLLAQIGDQYADLFLAAKNLSDAILLSDILRVNTEITKAPLSASMIKRYDEHHQDLTLLKALVRQQLPEKYKEIFFDQSKNGYAGYIDGGASQEEFYKFIKPILEKMDGTEELLVKLNREDLLRKQRTFDNGSIPHQIHLGELHAILRRQEDFYPFLKDNREKIEKILTFRIPYYVGPLARGNSRFAWMTRKSEETITPWNFEEVVDKGASAQSFIERMTNFDKNLPNEKVLPKHSLLYEYFTVYNELTKVKYVTEGMRKPAFLSGEQKKAIVDLLFKTNRKVTVKQLKEDYFKKIECFDSVEISGVEDRFNASLGTYHDLLKIIKDKDFLDNEENEDILEDIVLTLTLFEDREMIEERLKTYAHLFDDKVMKQLKRRRYTGWGRLSRKLINGIRDKQSGKTILDFLKSDGFANRNFMQLIHDDSLTFKEDIQKAQVSGQGDSLHEHIANLAGSPAIKKGILQTVKVVDELVKVMGRHKPENIVIEMARENQTTQKGQKNSRERMKRIEEGIKELGSQILKEHPVENTQLQNEKLYLYYLQNGRDMYVDQELDINRLSDYDVDHIVPQSFLKDDSIDNKVLTRSDKARGKSDNVPSEEVVKKMKNYWRQLLNAKLITQRKFDNLTKAERGGLSELDKAGFIKRQLVETRQITKHVAQILDSRMNTKYDENDKLIREVKVITLKSKLVSDFRKDFQFYKVREINNYHHAHDAYLNAVVGTALIKKYPKLESEFVYGDYKVYDVRKMIAKSEQEIGKATAKYFFYSNIMNFFKTEITLANGEIRKRPLIETNGETGEIVWDKGRDFATVRKVLSMPQVNIVKKTEVQTGGFSKESILPKRNSDKLIARKKDWDPKKYGGFDSPTVAYSVLVVAKVEKGKSKKLKSVKELLGITIMERSSFEKNPIDFLEAKGYKEVKKDLIIKLPKYSLFELENGRKRMLASAGELQKGNELALPSKYVNFLYLASHYEKLKGSPEDNEQKQLFVEQHKHYLDEIIEQISEFSKRVILADANLDKVLSAYNKHRDKPIREQAENIIHLFTLTNLGAPAAFKYFDTTIDRKRYTSTKEVLDATLIHQSITGLYETRIDLSQLGGDGGGSSEAAAKGGGGGTLGDQGSRGSDPLPEPRVTLTVEGIPTEFLVNTGAEHSVLTKPMGKMGSKRTVVAGATGSKVYPWTTKRLLKIGQKQVTHSFLVIPECPAPLLGRDLLTKLKAQIQFSTEGPQVTWEDRPAMCLVLNLEEEYRLHEKPVPPSIDPSWLQLFPMVWAEKAGMGLANQVPPVVVELKSDASPVAVRQYPMSKEAREGIRPHIQRFLDLGILVPCQSPWNTPLLPVKKPGTNDYRPVQDLREVNKRVQDIHPTVPNPYNLLSSLPPSHTWYSVLDLKDAFFCLKLHPNSQPLFAFEWRDPEKGNTGQLTWTRLPQGFKNSPTLFNEALHRDLASFRALNPQVVMLQYVDDLLVAAPTYRDCKEGTRRLLQELSKLGYRVSAKKAQLCREEVTYLGYLLKGGKRWLTPARKATVMKIPTPTTPRQVREFLGTAGFCRLWIPGFASLAAPLYPLTRPKVPFTWTEAHQEAFGRIKEALLSAPALALPDLTKPFALYVDEKEGVARGVLTQTLGPWRRPVAYLSKKLDPVASGWPTCLKAIAAVALLLKDADKLTLGQNVLVIAPHNLESIVRQPPDRWMTNARMTHYQSLLLNERVSFAPPAILNPATLLPVESDDTPIHICSEILAEETGTRPDLRDQPLPGVPAWYTDGSSFIMDGRRQAGAAIVDNKRTVWASNLPEGTSAQKAELIALTQALRLAEGKSINIYTDSRYAFATAHVHGAIYKQRGWLTSAGKDIKNKEEILALLEAIHLPKRVAIIHCPGHQRGTDPVATGNRKADEAAKQAAQSTRILTETTKNAGKRTADGSEFEKRTADGSEFESPKKKAKVE

SEQ ID NO: 7312 - protein, 2096 aa, synthetic construct
MPAAKRVKLDGGDKKYSIGLDIGTNSVGWAVITDEYKVPSKKFKVLGNTDRHSIKKNLIGALLFDSGETAEATRLKRTARRRYTRRKNRICYLQEIFSNEMAKVDDSFFHRLEESFLVEEDKKHERHPIFGNIVDEVAYHEKYPTIYHLRKKLVDSTDKADLRLIYLALAHMIKFRGHFLIEGDLNPDNSDVDKLFIQLVQTYNQLFEENPINASGVDAKAILSARLSKSRRLENLIAQLPGEKKNGLFGNLIALSLGLTPNFKSNFDLAEDAKLQLSKDTYDDDLDNLLAQIGDQYADLFLAAKNLSDAILLSDILRVNTEITKAPLSASMIKRYDEHHQDLTLLKALVRQQLPEKYKEIFFDQSKNGYAGYIDGGASQEEFYKFIKPILEKMDGTEELLVKLNREDLLRKQRTFDNGSIPHQIHLGELHAILRRQEDFYPFLKDNREKIEKILTFRIPYYVGPLARGNSRFAWMTRKSEETITPWNFEEVVDKGASAQSFIERMTNFDKNLPNEKVLPKHSLLYEYFTVYNELTKVKYVTEGMRKPAFLSGEQKKAIVDLLFKTNRKVTVKQLKEDYFKKIECFDSVEISGVEDRFNASLGTYHDLLKIIKDKDFLDNEENEDILEDIVLTLTLFEDREMIEERLKTYAHLFDDKVMKQLKRRRYTGWGRLSRKLINGIRDKQSGKTILDFLKSDGFANRNFMQLIHDDSLTFKEDIQKAQVSGQGDSLHEHIANLAGSPAIKKGILQTVKVVDELVKVMGRHKPENIVIEMARENQTTQKGQKNSRERMKRIEEGIKELGSQILKEHPVENTQLQNEKLYLYYLQNGRDMYVDQELDINRLSDYDVDHIVPQSFLKDDSIDNKVLTRSDKARGKSDNVPSEEVVKKMKNYWRQLLNAKLITQRKFDNLTKAERGGLSELDKAGFIKRQLVETRQITKHVAQILDSRMNTKYDENDKLIREVKVITLKSKLVSDFRKDFQFYKVREINNYHHAHDAYLNAVVGTALIKKYPKLESEFVYGDYKVYDVRKMIAKSEQEIGKATAKYFFYSNIMNFFKTEITLANGEIRKRPLIETNGETGEIVWDKGRDFATVRKVLSMPQVNIVKKTEVQTGGFSKESILPKRNSDKLIARKKDWDPKKYGGFDSPTVAYSVLVVAKVEKGKSKKLKSVKELLGITIMERSSFEKNPIDFLEAKGYKEVKKDLIIKLPKYSLFELENGRKRMLASAGELQKGNELALPSKYVNFLYLASHYEKLKGSPEDNEQKQLFVEQHKHYLDEIIEQISEFSKRVILADANLDKVLSAYNKHRDKPIREQAENIIHLFTLTNLGAPAAFKYFDTTIDRKRYTSTKEVLDATLIHQSITGLYETRIDLSQLGGDGGGSSEAAAKGGGGGLGIEDEYRLHETSTEPDVSLGSTWLSDFPQAWAETGGMGLAVRQAPLIIPLKATSTPVSIQQYPMSHEARLGIKPHIQRLLDQGILVPCQSPWNTPLLPVKKPGTNDYRPVQDLREVNKRVEDIHPTVPNPYNLLSGLPPSHQWYTVLDLKDAFFCLRLHPTSQPLFAFEWRDPGMGISGQLTWTRLPQGFKNSPTLFNEALHRDLADFRIQHPDLILLQYVDDILLAATSELDCQQGTRALLQTLGDLGYRASAKKAQICQKQVKYLGYLLREGQRWLTEARKETVMGQPVPKTPRQLREFLGKAGFCRLFIPGFAEMAAPLYPLTKPGTLFSWGPDQQKAYQEIKQALLTAPALGLPDLTKPFELFVDEKQGYAKGVLTQKLGPWRRPVAYLSKKLDPVAAGWPPCLRMVAAIAVLTKDAGKLTMGQPLVILAPHAVEALVKQPPDRWLSNARMTHYQAMLLDTDRVQFGPVVALNPATLLPLPEEGAPHDCLEILAETHGTRPDLTDQPIPDADHTWYTDGSSFLQEGQRKAGAAVTTETEVIWAGALPAGTSAQRAELIALTQALKMAEGKRLNVYTDSRYAFATAHIHGEIYRRRGWLTSEGREIKNKSEILALLKALFLPKRLSIIHCLGHQKGDSAEARGNRLADQAAREAAIKTPPDTSTLLIAGKRTADGSEFEKRTADGSEFESPKKKAKVE

SEQ ID NO: 7313 - protein, 2116 aa, synthetic construct
MPAAKRVKLDGGDKKYSIGLDIGTNSVGWAVITDEYKVPSKKFKVLGNTDRHSIKKNLIGALLFDSGETAEATRLKRTARRRYTRRKNRICYLQEIFSNEMAKVDDSFFHRLEESFLVEEDKKHERHPIFGNIVDEVAYHEKYPTIYHLRKKLVDSTDKADLRLIYLALAHMIKFRGHFLIEGDLNPDNSDVDKLFIQLVQTYNQLFEENPINASGVDAKAILSARLSKSRRLENLIAQLPGEKKNGLFGNLIALSLGLTPNFKSNFDLAEDAKLQLSKDTYDDDLDNLLAQIGDQYADLFLAAKNLSDAILLSDILRVNTEITKAPLSASMIKRYDEHHQDLTLLKALVRQQLPEKYKEIFFDQSKNGYAGYIDGGASQEEFYKFIKPILEKMDGTEELLVKLNREDLLRKQRTFDNGSIPHQIHLGELHAILRRQEDFYPFLKDNREKIEKILTFRIPYYVGPLARGNSRFAWMTRKSEETITPWNFEEVVDKGASAQSFIERMTNFDKNLPNEKVLPKHSLLYEYFTVYNELTKVKYVTEGMRKPAFLSGEQKKAIVDLLFKTNRKVTVKQLKEDYFKKIECFDSVEISGVEDRFNASLGTYHDLLKIIKDKDFLDNEENEDILEDIVLTLTLFEDREMIEERLKTYAHLFDDKVMKQLKRRRYTGWGRLSRKLINGIRDKQSGKTILDFLKSDGFANRNFMQLIHDDSLTFKEDIQKAQVSGQGDSLHEHIANLAGSPAIKKGILQTVKVVDELVKVMGRHKPENIVIEMARENQTTQKGQKNSRERMKRIEEGIKELGSQILKEHPVENTQLQNEKLYLYYLQNGRDMYVDQELDINRLSDYDVDHIVPQSFLKDDSIDNKVLTRSDKARGKSDNVPSEEVVKKMKNYWRQLLNAKLITQRKFDNLTKAERGGLSELDKAGFIKRQLVETRQITKHVAQILDSRMNTKYDENDKLIREVKVITLKSKLVSDFRKDFQFYKVREINNYHHAHDAYLNAVVGTALIKKYPKLESEFVYGDYKVYDVRKMIAKSEQEIGKATAKYFFYSNIMNFFKTEITLANGEIRKRPLIETNGETGEIVWDKGRDFATVRKVLSMPQVNIVKKTEVQTGGFSKESILPKRNSDKLIARKKDWDPKKYGGFDSPTVAYSVLVVAKVEKGKSKKLKSVKELLGITIMERSSFEKNPIDFLEAKGYKEVKKDLIIKLPKYSLFELENGRKRMLASAGELQKGNELALPSKYVNFLYLASHYEKLKGSPEDNEQKQLFVEQHKHYLDEIIEQISEFSKRVILADANLDKVLSAYNKHRDKPIREQAENIIHLFTLTNLGAPAAFKYFDTTIDRKRYTSTKEVLDATLIHQSITGLYETRIDLSQLGGDGGGSSEAAAKGGGGGTLNIEDEYRLHETSKEPDVSLGSTWLSDFPQAWAETGGMGLAVRQAPLIIPLKATSTPVSIKQYPMSQEARLGIKPHIQRLLDQGILVPCQSPWNTPLLPVKKPGTNDYRPVQDLREVNKRVEDIHPTVPNPYNLLSGLPPSHQWYTVLDLKDAFFCLRLHPTSQPLFAFEWRDPEMGISGQLTWTRLPQGFKNSPTLFNEALHRDLADFRIQHPDLILLQYVDDLLLAATSELDCQQGTRALLQTLGNLGYRASAKKAQICQKQVKYLGYLLKEGQRWLTEARKETVMGQPTPKTPRQLREFLGKAGFCRLFIPGFAEMAAPLYPLTKPGTLFNWGPDQQKAYQEIKQALLTAPALGLPDLTKPFELFVDEKQGYAKGVLTQKLGPWRRPVAYLSKKLDPVAAGWPPCLRMVAAIAVLTKDAGKLTMGQPLVILAPHAVEALVKQPPDRWLSNARMTHYQALLLDTDRVQFGPVVALNPATLLPLPEEGLQHNCLDILAEAHGTRPDLTDQPLPDADHTWYTDGSSLLQEGQRKAGAAVTTETEVIWAKALPAGTSAQRAELIALTQALKMAEGKKLNVYTDSRYAFATAHIHGEIYRRRGWLTSEGKEIKNKDEILALLKALFLPKRLSIIHCPGHQKGHSAEARGNRMADQAARKAAITETPDTSTLLIENSSPSGGSKRTADGSEFEAGKRTADGSEFEKRTADGSEFESPKKKAKVE

SEQ ID NO: 7314 - protein, 2116 aa, synthetic construct; identical to SEQ ID NO: 7313

SEQ ID NO: 7315 - protein, 2087 aa, synthetic construct
MPAAKRVKLDGGDKKYSIGLDIGTNSVGWAVITDEYKVPSKKFKVLGNTDRHSIKKNLIGALLFDSGETAEATRLKRTARRRYTRRKNRICYLQEIFSNEMAKVDDSFFHRLEESFLVEEDKKHERHPIFGNIVDEVAYHEKYPTIYHLRKKLVDSTDKADLRLIYLALAHMIKFRGHFLIEGDLNPDNSDVDKLFIQLVQTYNQLFEENPINASGVDAKAILSARLSKSRRLENLIAQLPGEKKNGLFGNLIALSLGLTPNFKSNFDLAEDAKLQLSKDTYDDDLDNLLAQIGDQYADLFLAAKNLSDAILLSDILRVNTEITKAPLSASMIKRYDEHHQDLTLLKALVRQQLPEKYKEIFFDQSKNGYAGYIDGGASQEEFYKFIKPILEKMDGTEELLVKLNREDLLRKQRTFDNGSIPHQIHLGELHAILRRQEDFYPFLKDNREKIEKILTFRIPYYVGPLARGNSRFAWMTRKSEETITPWNFEEVVDKGASAQSFIERMTNFDKNLPNEKVLPKHSLLYEYFTVYNELTKVKYVTEGMRKPAFLSGEQKKAIVDLLFKTNRKVTVKQLKEDYFKKIECFDSVEISGVEDRFNASLGTYHDLLKIIKDKDFLDNEENEDILEDIVLTLTLFEDREMIEERLKTYAHLFDDKVMKQLKRRRYTGWGRLSRKLINGIRDKQSGKTILDFLKSDGFANRNFMQLIHDDSLTFKEDIQKAQVSGQGDSLHEHIANLAGSPAIKKGILQTVKVVDELVKVMGRHKPENIVIEMARENQTTQKGQKNSRERMKRIEEGIKELGSQILKEHPVENTQLQNEKLYLYYLQNGRDMYVDQELDINRLSDYDVDHIVPQSFLKDDSIDNKVLTRSDKARGKSDNVPSEEVVKKMKNYWRQLLNAKLITQRKFDNLTKAERGGLSELDKAGFIKRQLVETRQITKHVAQILDSRMNTKYDENDKLIREVKVITLKSKLVSDFRKDFQFYKVREINNYHHAHDAYLNAVVGTALIKKYPKLESEFVYGDYKVYDVRKMIAKSEQEIGKATAKYFFYSNIMNFFKTEITLANGEIRKRPLIETNGETGEIVWDKGRDFATVRKVLSMPQVNIVKKTEVQTGGFSKESILPKRNSDKLIARKKDWDPKKYGGFDSPTVAYSVLVVAKVEKGKSKKLKSVKELLGITIMERSSFEKNPIDFLEAKGYKEVKKDLIIKLPKYSLFELENGRKRMLASAGELQKGNELALPSKYVNFLYLASHYEKLKGSPEDNEQKQLFVEQHKHYLDEIIEQISEFSKRVILADANLDKVLSAYNKHRDKPIREQAENIIHLFTLTNLGAPAAFKYFDTTIDRKRYTSTKEVLDATLIHQSITGLYETRIDLSQLGGDGGGSSEAAAKGGGGGIPWLMKKPLQLTTLVPLQEYEERLLKQTMLTGSYKEKLQSLFLKYDALWQHWENQVGHRRIKPHHIATGTVNPRPQKQYPINPKAKASIQTVINDLLKQGVLIQQNSIMNTPVYPVPKPDGKWRMVLDYREVNKTIPLIAAQNQHSAGILSSIFRGKYKTTLDLSNGFWAHSITPESYWLTAFTWLGQQYCWTRLPQGFLNSPALFNADVVDLLKEVPNVQVYVDDIYISHDDPREHLEQLEKVFSLLLNAGYVVSLKKSEIAQHEVEFLGFNITKEGRGLTETFKQKLLNITPPRDLKQLQSILGLLNFARNFIPNFSELVKPLYNIIATAPGKYITWTTDNSQQLQNIISMLNSAENLEERNPEVRLIMKVNTSPSAGYIRFYNEFAKRPIMYLNYVYTKAEVKFTNTEKLLTTIHKGLIKALDLGMGQEILVYSPIVSMTKIQKTPLPERKALPIRWITWMSYLEDPRIQFHYDKTLPELQQVPTVTDDIIAKIKHPSEFSMVFYTDGSAIKHPNVNKSHNAGMGIAQVQFKPEFTVINTWSIPLGDHTAQLAEVAAVEFACKKALKIDGPVLIVTDSFYVAESVNKELPYWQSNGFFNNKKKPLKHVSKWKSIADCIQLKPDIIIIHEKGHQPTASTFHTEGNNLADKLATQGSYVVNAGKRTADGSEFEKRTADGSEFESPKKKAKVE

SEQ ID NO: 7316 - protein, 2096 aa, synthetic construct
MPAAKRVKLDGGDKKYSIGLDIGTNSVGWAVITDEYKVPSKKFKVLGNTDRHSIKKNLIGALLFDSGETAEATRLKRTARRRYTRRKNRICYLQEIFSNEMAKVDDSFFHRLEESFLVEEDKKHERHPIFGNIVDEVAYHEKYPTIYHLRKKLVDSTDKADLRLIYLALAHMIKFRGHFLIEGDLNPDNSDVDKLFIQLVQTYNQLFEENPINASGVDAKAILSARLSKSRRLENLIAQLPGEKKNGLFGNLIALSLGLTPNFKSNFDLAEDAKLQLSKDTYDDDLDNLLAQIGDQYADLFLAAKNLSDAILLSDILRVNTEITKAPLSASMIKRYDEHHQDLTLLKALVRQQLPEKYKEIFFDQSKNGYAGYIDGGASQEEFYKFIKPILEKMDGTEELLVKLNREDLLRKQRTFDNGSIPHQIHLGELHAILRRQEDFYPFLKDNREKIEKILTFRIPYYVGPLARGNSRFAWMTRKSEETITPWNFEEVVDKGASAQSFIERMTNFDKNLPNEKVLPKHSLLYEYFTVYNELTKVKYVTEGMRKPAFLSGEQKKAIVDLLFKTNRKVTVKQLKEDYFKKIECFDSVEISGVEDRFNASLGTYHDLLKIIKDKDFLDNEENEDILEDIVLTLTLFEDREMIEERLKTYAHLFDDKVMKQLKRRRYTGWGRLSRKLINGIRDKQSGKTILDFLKSDGFANRNFMQLIHDDSLTFKEDIQKAQVSGQGDSLHEHIANLAGSPAIKKGILQTVKVVDELVKVMGRHKPENIVIEMARENQTTQKGQKNSRERMKRIEEGIKELGSQILKEHPVENTQLQNEKLYLYYLQNGRDMYVDQELDINRLSDYDVDHIVPQSFLKDDSIDNKVLTRSDKARGKSDNVPSEEVVKKMKNYWRQLLNAKLITQRKFDNLTKAERGGLSELDKAGFIKRQLVETRQITKHVAQILDSRMNTKYDENDKLIREVKVITLKSKLVSDFRKDFQFYKVREINNYHHAHDAYLNAVVGTALIKKYPKLESEFVYGDYKVYDVRKMIAKSEQEIGKATAKYFFYSNIMNFFKTEITLANGEIRKRPLIETNGETGEIVWDKGRDFATVRKVLSMPQVNIVKKTEVQTGGFSKESILPKRNSDKLIARKKDWDPKKYGGFDSPTVAYSVLVVAKVEKGKSKKLKSVKELLGITIMERSSFEKNPIDFLEAKGYKEVKKDLIIKLPKYSLFELENGRKRMLASAGELQKGNELALPSKYVNFLYLASHYEKLKGSPEDNEQKQLFVEQHKHYLDEIIEQISEFSKRVILADANLDKVLSAYNKHRDKPIREQAENIIHLFTLTNLGAPAAFKYFDTTIDRKRYTSTKEVLDATLIHQSITGLYETRIDLSQLGGDGGGSSEAAAKGGGGGTLNIEDEYRLHETSKEPDVPLGSTWLSDFPQAWAETGGMGLAVRQAPLIIPLKATSTPVSIKQYPMSQEARLGIKPHIQRLLDQGILVPCQSPWNTPLLPVKKPGTNDYRPVQDLREVNKRVEDIHPTVPNPYNLLSGLPPSHQWYTVLDLKDAFFCLRLHPTSQPLFAFEWRDPEMGISGQLTWTRLPQGFKNSPTLFNEALHRDLADFRIQHPDLILLQYVDDLLLAATSEQDCQRGTRALLQTLGNLGYRASAKKAQICQKQVKYLGYLLKEGQRWLTEARKETVMGQPTPKTPRQLREFLGTAGFCRLWIPGFAEMAAPLYPLTKPGTLFNWGPDQQKAYQEIKQALLTAPALGLPDLTKPFELFVDEKQGYAKGVLTQKLGPWRRPVAYLSKKLDPVAAGWPPCLRMVAAIAVLTKDAGKLTMGQPLVILAPHAVEALVKQPPDRWLSNARMTHYQAMLLDTDRVQFGPVVALNPATLLPLPEKEAPHDCLEILAETHGTRPDLTDQPIPDADYTWYTDGSSFLQEGQRRAGAAVTTETEVIWARALPAGTSAQRAELIALTQALKMAEGKKLNVYTDSRYAFATAHVHGEIYRRRGWLTSEGREIKNKNEILALLKALFLPKRLSIIHCPGHQKGNSAEARGNRMADQAAREAAMKAVLETSTLLAGKRTADGSEFEKRTADGSEFESPKKKAKVE

SEQ ID NO: 7317 - protein, 2096 aa, synthetic construct
MPAAKRVKLDGGDKKYSIGLDIGTNSVGWAVITDEYKVPSKKFKVLGNTDRHSIKKNLIGALLFDSGETAEATRLKRTARRRYTRRKNRICYLQEIFSNEMAKVDDSFFHRLEESFLVEEDKKHERHPIFGNIVDEVAYHEKYPTIYHLRKKLVDSTDKADLRLIYLALAHMIKFRGHFLIEGDLNPDNSDVDKLFIQLVQTYNQLFEENPINASGVDAKAILSARLSKSRRLENLIAQLPGEKKNGLFGNLIALSLGLTPNFKSNFDLAEDAKLQLSKDTYDDDLDNLLAQIGDQYADLFLAAKNLSDAILLSDILRVNTEITKAPLSASMIKRYDEHHQDLTLLKALVRQQLPEKYKEIFFDQSKNGYAGYIDGGASQEEFYKFIKPILEKMDGTEELLVKLNREDLLRKQRTFDNGSIPHQIHLGELHAILRRQEDFYPFLKDNREKIEKILTFRIPYYVGPLARGNSRFAWMTRKSEETITPWNFEEVVDKGASAQSFIERMTNFDKNLPNEKVLPKHSLLYEYFTVYNELTKVKYVTEGMRKPAFLSGEQKKAIVDLLFKTNRKVTVKQLKEDYFKKIECFDSVEISGVEDRFNASLGTYHDLLKIIKDKDFLDNEENEDILEDIVLTLTLFEDREMIEERLKTYAHLFDDKVMKQLKRRRYTGWGRLSRKLINGIRDKQSGKTILDFLKSDGFANRNFMQLIHDDSLTFKEDIQKAQVSGQGDSLHEHIANLAGSPAIKKGILQTVKVVDELVKVMGRHKPENIVIEMARENQTTQKGQKNSRERMKRIEEGIKELGSQILKEHPVENTQLQNEKLYLYYLQNGRDMYVDQELDINRLSDYDVDHIVPQSFLKDDSIDNKVLTRSDKARGKSDNVPSEEVVKKMKNYWRQLLNAKLITQRKFDNLTKAERGGLSELDKAGFIKRQLVETRQITKHVAQILDSRMNTKYDENDKLIREVKVITLKSKLVSDFRKDFQFYKVREINNYHHAHDAYLNAVVGTALIKKYPKLESEFVYGDYKVYDVRKMIAKSEQEIGKATAKYFFYSNIMNFFKTEITLANGEIRKRPLIETNGETGEIVWDKGRDFATVRKVLSMPQVNIVKKTEVQTGGFSKESILPKRNSDKLIARKKDWDPKKYGGFDSPTVAYSVLVVAKVEKGKSKKLKSVKELLGITIMERSSFEKNPIDFLEAKGYKEVKKDLIIKLPKYSLFELENGRKRMLASAGELQKGNELALPSKYVNFLYLASHYEKLKGSPEDNEQKQLFVEQHKHYLDEIIEQISEFSKRVILADANLDKVLSAYNKHRDKPIREQAENIIHLFTLTNLGAPAAFKYFDTTIDRKRYTSTKEVLDATLIHQSITGLYETRIDLSQLGGDGGGSSEAAAKGGGGGTLNIEDEYRLHETSKEPDVPLGSTWLSDFPQAWAETGGMGLAVRQAPLIIPLKATSTPVSIKQYPMSQEARLGIKPHIQRLLDQGILVPCQSPWNTPLLPVKKPGTNDYRPVQDLREVNKRVEDIHPTVPNPYNLLSGLPPSHQWYTVLDLKDAFFCLRLHPTSQPLFAFEWRDPEMGISGQLTWTRLPQGFKNSPTLFNEALHRDLADFRIQHPDLILLQYVDDLLLAATSEQDCQRGTRALLQTLGNLGYRASAKKAQICQKQVKYLGYLLKEGQRWLTEARKETVMGQPTPKTPRQLREFLGKAGFCRLFIPGFAEMAAPLYPLTKPGTLFNWGPDQQKAYQEIKQALLTAPALGLPDLTKPFELFVDEKQGYAKGVLTQKLGPWRRPVAYLSKKLDPVAAGWPPCLRMVAAIAVLTKDAGKLTMGQPLVILAPHAVEALVKQPPDRWLSNARMTHYQAMLLDTDRVQFGPVVALNPATLLPLPEKEAPHDCLEILAETHGTRPDLTDQPIPDADYTWYTDGSSFLQEGQRRAGAAVTTETEVIWARALPAGTSAQRAELIALTQALKMAEGKKLNVYTDSRYAFATAHVHGEIYRRRGWLTSEGREIKNKNEILALLKALFLPKRLSIIHCPGHQKGNSAEARGNRMADQAAREAAMKAVLETSTLLAGKRTADGSEFEKRTADGSEFESPKKKAKVE

SEQ ID NO: 7318 - protein, 2098 aa, synthetic construct
MPAAKRVKLDGGDKKYSIGLDIGTNSVGWAVITDEYKVPSKKFKVLGNTDRHSIKKNLIGALLFDSGETAEATRLKRTARRRYTRRKNRICYLQEIFSNEMAKVDDSFFHRLEESFLVEEDKKHERHPIFGNIVDEVAYHEKYPTIYHLRKKLVDSTDKADLRLIYLALAHMIKFRGHFLIEGDLNPDNSDVDKLFIQLVQTYNQLFEENPINASGVDAKAILSARLSKSRRLENLIAQLPGEKKNGLFGNLIALSLGLTPNFKSNFDLAEDAKLQLSKDTYDDDLDNLLAQIGDQYADLFLAAKNLSDAILLSDILRVNTEITKAPLSASMIKRYDEHHQDLTLLKALVRQQLPEKYKEIFFDQSKNGYAGYIDGGASQEEFYKFIKPILEKMDGTEELLVKLNREDLLRKQRTFDNGSIPHQIHLGELHAILRRQEDFYPFLKDNREKIEKILTFRIPYYVGPLARGNSRFAWMTRKSEETITPWNFEEVVDKGASAQSFIERMTNFDKNLPNEKVLPKHSLLYEYFTVYNELTKVKYVTEGMRKPAFLSGEQKKAIVDLLFKTNRKVTVKQLKEDYFKKIECFDSVEISGVEDRFNASLGTYHDLLKIIKDKDFLDNEENEDILEDIVLTLTLFEDREMIEERLKTYAHLFDDKVMKQLKRRRYTGWGRLSRKLINGIRDKQSGKTILDFLKSDGFANRNFMQLIHDDSLTFKEDIQKAQVSGQGDSLHEHIANLAGSPAIKKGILQTVKVVDELVKVMGRHKPENIVIEMARENQTTQKGQKNSRERMKRIEEGIKELGSQILKEHPVENTQLQNEKLYLYYLQNGRDMYVDQELDINRLSDYDVDHIVPQSFLKDDSIDNKVLTRSDKARGKSDNVPSEEVVKKMKNYWRQLLNAKLITQRKFDNLTKAERGGLSELDKAGFIKRQLVETRQITKHVAQILDSRMNTKYDENDKLIREVKVITLKSKLVSDFRKDFQFYKVREINNYHHAHDAYLNAVVGTALIKKYPKLESEFVYGDYKVYDVRKMIAKSEQEIGKATAKYFFYSNIMNFFKTEITLANGEIRKRPLIETNGETGEIVWDKGRDFATVRKVLSMPQVNIVKKTEVQTGGFSKESILPKRNSDKLIARKKDWDPKKYGGFDSPTVAYSVLVVAKVEKGKSKKLKSVKELLGITIMERSSFEKNPIDFLEAKGYKEVKKDLIIKLPKYSLFELENGRKRMLASAGELQKGNELALPSKYVNFLYLASHYEKLKGSPEDNEQKQLFVEQHKHYLDEIIEQISEFSKRVILADANLDKVLSAYNKHRDKPIREQAENIIHLFTLTNLGAPAAFKYFDTTIDRKRYTSTKEVLDATLIHQSITGLYETRIDLSQLGGDGGEAAAKGGGGSSGGTAPLEEEYRLFLEAPIQNVTLLEQWKREIPKVWAEINPPGLASTQAPIHVQLLSTALPVRVRQYPITLEAKRSLRETIRKFRAAGILRPVHSPWNTPLLPVRKSGTSEYRMVQDLREVNKRVETIHPTVPNPYTLLSLLPPDRIWYSVLDLKDAFFCIPLAPESQLIFAFEWADAEEGESGQLTWTRLPQGFKNSPTLFDEALNRDLQGFRLDHPSVSLLQYVDDLLIAADTQAACLSATRDLLMTLAELGYRVSGKKAQLCQEEVTYLGFKIHKGSRSLSNSRTQAILQIPVPKTKRQVREFLGTIGYCRLWIPGFAELAQPLYAATRGGNDPLVWGEKEEEAFQSLKLALTQPPALALPSLDKPFQLFVEETSGAAKGVLTQALGPWKRPVAYLSKRLDPVAAGWPRCLRAIAAAALLTREASKLTFGQDIEITSSHNLESLLRSPPDKWLTNARITQYQVLLLDPPRVRFKQTAALNPATLLPETDDTLPIHHCLDTLDSLTSTRPDLTDQPLAQAEATLFTDGSSYIRDGKRYAGAAVVTLDSVIWAEPLPIGTSAQKAELIALTKALEWSKDKSVNIYTDSRYAFATLHVHGMIYRERGLLTAGGKAIKNAPEILALLTAVWLPKRVAVMHCKGHQKDDAPTSTGNRRADEVAREVAIRPLSTQATISAGKRTADGSEFEKRTADGSEFESPKKKAKVE

SEQ ID NO: 7319 - protein, 2098 aa, synthetic construct
MPAAKRVKLDGGDKKYSIGLDIGTNSVGWAVITDEYKVPSKKFKVLGNTDRHSIKKNLIGALLFDSGETAEATRLKRTARRRYTRRKNRICYLQEIFSNEMAKVDDSFFHRLEESFLVEEDKKHERHPIFGNIVDEVAYHEKYPTIYHLRKKLVDSTDKADLRLIYLALAHMIKFRGHFLIEGDLNPDNSDVDKLFIQLVQTYNQLFEENPINASGVDAKAILSARLSKSRRLENLIAQLPGEKKNGLFGNLIALSLGLTPNFKSNFDLAEDAKLQLSKDTYDDDLDNLLAQIGDQYADLFLAAKNLSDAILLSDILRVNTEITKAPLSASMIKRYDEHHQDLTLLKALVRQQLPEKYKEIFFDQSKNGYAGYIDGGASQEEFYKFIKPILEKMDGTEELLVKLNREDLLRKQRTFDNGSIPHQIHLGELHAILRRQEDFYPFLKDNREKIEKILTFRIPYYVGPLARGNSRFAWMTRKSEETITPWNFEEVVDKGASAQSFIERMTNFDKNLPNEKVLPKHSLLYEYFTVYNELTKVKYVTEGMRKPAFLSGEQKKAIVDLLFKTNRKVTVKQLKEDYFKKIECFDSVEISGVEDRFNASLGTYHDLLKIIKDKDFLDNEENEDILEDIVLTLTLFEDREMIEERLKTYAHLFDDKVMKQLKRRRYTGWGRLSRKLINGIRDKQSGKTILDFLKSDGFANRNFMQLIHDDSLTFKEDIQKAQVSGQGDSLHEHIANLAGSPAIKKGILQTVKVVDELVKVMGRHKPENIVIEMARENQTTQKGQKNSRERMKRIEEGIKELGSQILKEHPVENTQLQNEKLYLYYLQNGRDMYVDQELDINRLSDYDVDHIVPQSFLKDDSIDNKVLTRSDKARGKSDNVPSEEVVKKMKNYWRQLLNAKLITQRKFDNLTKAERGGLSELDKAGFIKRQLVETRQITKHVAQILDSRMNTKYDENDKLIREVKVITLKSKLVSDFRKDFQFYKVREINNYHHAHDAYLNAVVGTALIKKYPKLESEFVYGDYKVYDVRKMIAKSEQEIGKATAKYFFYSNIMNFFKTEITLANGEIRKRPLIETNGETGEIVWDKGRDFATVRKVLSMPQVNIVKKTEVQTGGFSKESILPKRNSDKLIARKKDWDPKKYGGFDSPTVAYSVLVVAKVEKGKSKKLKSVKELLGITIMERSSFEKNPIDFLEAKGYKEVKKDLIIKLPKYSLFELENGRKRMLASAGELQKGNELALPSKYVNFLYLASHYEKLKGSPEDNEQKQLFVEQHKHYLDEIIEQISEFSKRVILADANLDKVLSAYNKHRDKPIREQAENIIHLFTLTNLGAPAAFKYFDTTIDRKRYTSTKEVLDATLIHQSITGLYETRIDLSQLGGDGGEAAAKGGGGSSGGTAPLEEEYRLFLEAPIQNVTLLEQWKREIPKVWAEINPPGLASTQAPIHVQLLSTALPVRVRQYPITLEAKRSLRETIRKFRAAGILRPVHSPWNTPLLPVRKSGTSEYRMVQDLREVNKRVETIHPTVPNPYTLLSLLPPDRIWYSVLDLKDAFFCIPLAPESQLIFAFEWADAEEGESGQLTWTRLPQGFKNSPTLFNEALNRDLQGFRLDHPSVSLLQYVDDLLIAADTQAACLSATRDLLMTLAELGYRVSGKKAQLCQEEVTYLGFKIHKGSRSLSNSRTQAILQIPVPKTKRQVREFLGTIGYCRLWIPGFAELAQPLYAATRPGNDPLVWGEKEEEAFQSLKLALTQPPALALPSLDKPFQLFVEETSGAAKGVLTQALGPWKRPVAYLSKRLDPVAAGWPRCLRAIAAAALLTREASKLTFGQDIEITSSHNLESLLRSPPDKWLTNARITQYQVLLLDPPRVRFKQTAALNPATLLPETDDTLPIHHCLDTLDSLTSTRPDLTDQPLAQAEATLFTDGSSYIRDGKRYAGAAVVTLDSVIWAEPLPIGTSAQKAELIALTKALEWSKDKSVNIYTDSRYAFATLHVHGMIYRERGWLTAGGKAIKNAPEILALLTAVWLPKRVAVMHCKGHQKDDAPTSTGNRRADEVAREVAIRPLSTQATISAGKRTADGSEFEKRTADGSEFESPKKKAKVE

SEQ ID NO: 7320 - protein, 2098 aa, synthetic construct
MPAAKRVKLDGGDKKYSIGLDIGTNSVGWAVITDEYKVPSKKFKVLGNTDRHSIKKNLIGALLFDSGETAEATRLKRTARRRYTRRKNRICYLQEIFSNEMAKVDDSFFHRLEESFLVEEDKKHERHPIFGNIVDEVAYHEKYPTIYHLRKKLVDSTDKADLRLIYLALAHMIKFRGHFLIEGDLNPDNSDVDKLFIQLVQTYNQLFEENPINASGVDAKAILSARLSKSRRLENLIAQLPGEKKNGLFGNLIALSLGLTPNFKSNFDLAEDAKLQLSKDTYDDDLDNLLAQIGDQYADLFLAAKNLSDAILLSDILRVNTEITKAPLSASMIKRYDEHHQDLTLLKALVRQQLPEKYKEIFFDQSKNGYAGYIDGGASQEEFYKFIKPILEKMDGTEELLVKLNREDLLRKQRTFDNGSIPHQIHLGELHAILRRQEDFYPFLKDNREKIEKILTFRIPYYVGPLARGNSRFAWMTRKSEETITPWNFEEVVDKGASAQSFIERMTNFDKNLPNEKVLPKHSLLYEYFTVYNELTKVKYVTEGMRKPAFLSGEQKKAIVDLLFKTNRKVTVKQLKEDYFKKIECFDSVEISGVEDRFNASLGTYHDLLKIIKDKDFLDNEENEDILEDIVLTLTLFEDREMIEERLKTYAHLFDDKVMKQLKRRRYTGWGRLSRKLINGIRDKQSGKTILDFLKSDGFANRNFMQLIHDDSLTFKEDIQKAQVSGQGDSLHEHIANLAGSPAIKKGILQTVKVVDELVKVMGRHKPENIVIEMARENQTTQKGQKNSRERMKRIEEGIKELGSQILKEHPVENTQLQNEKLYLYYLQNGRDMYVDQELDINRLSDYDVDHIVPQSFLKDDSIDNKVLTRSDKARGKSDNVPSEEVVKKMKNYWRQLLNAKLITQRKFDNLTKAERGGLSELDKAGFIKRQLVETRQITKHVAQILDSRMNTKYDENDKLIREVKVITLKSKLVSDFRKDFQFYKVREINNYHHAHDAYLNAVVGTALIKKYPKLESEFVYGDYKVYDVRKMIAKSEQEIGKATAKYFFYSNIMNFFKTEITLANGEIRKRPLIETNGETGEIVWDKGRDFATVRKVLSMPQVNIVKKTEVQTGGFSKESILPKRNSDKLIARKKDWDPKKYGGFDSPTVAYSVLVVAKVEKGKSKKLKSVKELLGITIMERSSFEKNPIDFLEAKGYKEVKKDLIIKLPKYSLFELENGRKRMLASAGELQKGNELALPSKYVNFLYLASHYEKLKGSPEDNEQKQLFVEQHKHYLDEIIEQISEFSKRVILADANLDKVLSAYNKHRDKPIREQAENIIHLFTLTNLGAPAAFKYFDTTIDRKRYTSTKEVLDATLIHQSITGLYETRIDLSQLGGDGGEAAAKGGGGSSGGTAPLEEEYRLFLEAPIQNVTLLEQWKREIPKVWAEINPPGLASTQAPIHVQLLSTALPVRVRQYPITLEAKRSLRETIRKFRAAGILRPVHSPWNTPLLPVRKSGTSEYRMVQDLREVNKRVETIHPTVPNPYTLLSLLPPDRIWYSVLDLKDAFFCIPLAPESQLIFAFEWADAEEGESGQLTWTRLPQGFKNSPTLFNEALNRDLQGFRLDHPSVSLLQYVDDLLIAADTQAACLSATRDLLMTLAELGYRVSGKKAQLCQEEVTYLGFKIHKGSRSLSNSRTQAILQIPVPKTKRQVREFLGKIGYCRLFIPGFAELAQPLYAATRPGNDPLVWGEKEEEAFQSLKLALTQPPALALPSLDKPFQLFVEETSGAAKGVLTQALGPWKRPVAYLSKRLDPVAAGWPRCLRAIAAAALLTREASKLTFGQDIEITSSHNLESLLRSPPDKWLTNARITQYQVLLLDPPRVRFKQTAALNPATLLPETDDTLPIHHCLDTLDSLTSTRPDLTDQPLAQAEATLFTDGSSYIRDGKRYAGAAVVTLDSVIWAEPLPIGTSAQKAELIALTKALEWSKDKSVNIYTDSRYAFATLHVHGMIYRERGWLTAGGKAIKNAPEILALLTAVWLPKRVAVMHCKGHQKDDAPTSTGNRRADEVAREVAIRPLSTQATISAGKRTADGSEFEKRTADGSEFESPKKKAKVE

SEQ ID NO: 7321 - protein, 2102 aa, synthetic construct
MPAAKRVKLDGGDKKYSIGLDIGTNSVGWAVITDEYKVPSKKFKVLGNTDRHSIKKNLIGALLFDSGETAEATRLKRTARRRYTRRKNRICYLQEIFSNEMAKVDDSFFHRLEESFLVEEDKKHERHPIFGNIVDEVAYHEKYPTIYHLRKKLVDSTDKADLRLIYLALAHMIKFRGHFLIEGDLNPDNSDVDKLFIQLVQTYNQLFEENPINASGVDAKAILSARLSKSRRLENLIAQLPGEKKNGLFGNLIALSLGLTPNFKSNFDLAEDAKLQLSKDTYDDDLDNLLAQIGDQYADLFLAAKNLSDAILLSDILRVNTEITKAPLSASMIKRYDEHHQDLTLLKALVRQQLPEKYKEIFFDQSKNGYAGYIDGGASQEEFYKFIKPILEKMDGTEELLVKLNREDLLRKQRTFDNGSIPHQIHLGELHAILRRQEDFYPFLKDNREKIEKILTFRIPYYVGPLARGNSRFAWMTRKSEETITPWNFEEVVDKGASAQSFIERMTNFDKNLPNEKVLPKHSLLYEYFTVYNELTKVKYVTEGMRKPAFLSGEQKKAIVDLLFKTNRKVTVKQLKEDYFKKIECFDSVEISGVEDRFNASLGTYHDLLKIIKDKDFLDNEENEDILEDIVLTLTLFEDREMIEERLKTYAHLFDDKVMKQLKRRRYTGWGRLSRKLINGIRDKQSGKTILDFLKSDGFANRNFMQLIHDDSLTFKEDIQKAQVSGQGDSLHEHIANLAGSPAIKKGILQTVKVVDELVKVMGRHKPENIVIEMARENQTTQKGQKNSRERMKRIEEGIKELGSQILKEHPVENTQLQNEKLYLYYLQNGRDMYVDQELDINRLSDYDVDHIVPQSFLKDDSIDNKVLTRSDKARGKSDNVPSEEVVKKMKNYWRQLLNAKLITQRKFDNLTKAERGGLSELDKAGFIKRQLVETRQITKHVAQILDSRMNTKYDENDKLIREVKVITLKSKLVSDFRKDFQFYKVREINNYHHAHDAYLNAVVGTALIKKYPKLESEFVYGDYKVYDVRKMIAKSEQEIGKATAKYFFYSNIMNFFKTEITLANGEIRKRPLIETNGETGEIVWDKGRDFATVRKVLSMPQVNIVKKTEVQTGGFSKESILPKRNSDKLIARKKDWDPKKYGGFDSPTVAYSVLVVAKVEKGKSKKLKSVKELLGITIMERSSFEKNPIDFLEAKGYKEVKKDLIIKLPKYSLFELENGRKRMLASAGELQKGNELALPSKYVNFLYLASHYEKLKGSPEDNEQKQLFVEQHKHYLDEIIEQISEFSKRVILADANLDKVLSAYNKHRDKPIREQAENIIHLFTLTNLGAPAAFKYFDTTIDRKRYTSTKEVLDATLIHQSITGLYETRIDLSQLGGDGGEAAAKGGGGSSGGTVSLQDEHRLFDIPVTTSLPDVWLQDFPQAWAETGGLGRAKCQAPIIIDLKPTAVPVSIKQYPMSLEAHMGIRQHIIKFLELGVLRPCRSPWNTPLLPVKKPGTQDYRPVQDLREINKRTVDIHPTVPNPYNLLSTLKPDYSWYTVLDLKDAFFCLPLAPQSQELFAFEWKDPERGISGQLTWTRLPQGFKNSPTLFDEALHRDLTDFRTQHPEVTLLQYVDDLLLAAPTKKACTQGTRHLLQELGEKGYRASAKKAQICQTKVTYLGYILSEGKRWLTPGRIETVARIPPPRNPREVREFLGTAGFCRLWIPGFAELAAPLYALTKESTPFTWQTEHQLAFEALKKALLSAPALGLPDTSKPFTLFLDERQGIAKGVLTQKLGPWKRPVAYLSKKLDPVAAGWPPCLRIMAATAMLVKDSAKLTLGQPLTVITPHTLEAIVRQPPDRWITNARLTHYQALLLDTDRVQFGPPVTLNPATLLPVPENQPSPHDCRQVLAETHGTREDLKDQELPDADHTWYTDGSSYLDSGTRRAGAAVVDGHNTIWAQSLPPGTSAQKAELIALTKALELSKGKKANIYTDSRYAFATAHTHGSIYERRGLLTSEGKEIKNKAEIIALLKALFLPQEVAIIHCPGHQKGQDPVAVGNRQADRVARQAAMAEVLTLATEPDNTSHITAGKRTADGSEFEKRTADGSEFESPKKKAKVE

SEQ ID NO: 7322 - protein, 2087 aa, synthetic construct
MPAAKRVKLDGGDKKYSIGLDIGTNSVGWAVITDEYKVPSKKFKVLGNTDRHSIKKNLIGALLFDSGETAEATRLKRTARRRYTRRKNRICYLQEIFSNEMAKVDDSFFHRLEESFLVEEDKKHERHPIFGNIVDEVAYHEKYPTIYHLRKKLVDSTDKADLRLIYLALAHMIKFRGHFLIEGDLNPDNSDVDKLFIQLVQTYNQLFEENPINASGVDAKAILSARLSKSRRLENLIAQLPGEKKNGLFGNLIALSLGLTPNFKSNFDLAEDAKLQLSKDTYDDDLDNLLAQIGDQYADLFLAAKNLSDAILLSDILRVNTEITKAPLSASMIKRYDEHHQDLTLLKALVRQQLPEKYKEIFFDQSKNGYAGYIDGGASQEEFYKFIKPILEKMDGTEELLVKLNREDLLRKQRTFDNGSIPHQIHLGELHAILRRQEDFYPFLKDNREKIEKILTFRIPYYVGPLARGNSRFAWMTRKSEETITPWNFEEVVDKGASAQSFIERMTNFDKNLPNEKVLPKHSLLYEYFTVYNELTKVKYVTEGMRKPAFLSGEQKKAIVDLLFKTNRKVTVKQLKEDYFKKIECFDSVEISGVEDRFNASLGTYHDLLKIIKDKDFLDNEENEDILEDIVLTLTLFEDREMIEERLKTYAHLFDDKVMKQLKRRRYTGWGRLSRKLINGIRDKQSGKTILDFLKSDGFANRNFMQLIHDDSLTFKEDIQKAQVSGQGDSLHEHIANLAGSPAIKKGILQTVKVVDELVKVMGRHKPENIVIEMARENQTTQKGQKNSRERMKRIEEGIKELGSQILKEHPVENTQLQNEKLYLYYLQNGRDMYVDQELDINRLSDYDVDHIVPQSFLKDDSIDNKVLTRSDKARGKSDNVPSEEVVKKMKNYWRQLLNAKLITQRKFDNLTKAERGGLSELDKAGFIKRQLVETRQITKHVAQILDSRMNTKYDENDKLIREVKVITLKSKLVSDFRKDFQFYKVREINNYHHAHDAYLNAVVGTALIKKYPKLESEFVYGDYKVYDVRKMIAKSEQEIGKATAKYFFYSNIMNFFKTEITLANGEIRKRPLIETNGETGEIVWDKGRDFATVRKVLSMPQVNIVKKTEVQTGGFSKESILPKRNSDKLIARKKDWDPKKYGGFDSPTVAYSVLVVAKVEKGKSKKLKSVKELLGITIMERSSFEKNPIDFLEAKGYKEVKKDLIIKLPKYSLFELENGRKRMLASAGELQKGNELALPSKYVNFLYLASHYEKLKGSPEDNEQKQLFVEQHKHYLDEIIEQISEFSKRVILADANLDKVLSAYNKHRDKPIREQAENIIHLFTLTNLGAPAAFKYFDTTIDRKRYTSTKEVLDATLIHQSITGLYETRIDLSQLGGDGGEAAAKGGGGSSGGVPWILKKPLELTIKLDLEEQQGTLLNNSILSKKGKEELKQLFEKYSALWQSWENQVGHRRIRPHKIATGTVKPTPQKQYHINPKAKPDIQIVINDLLKQGVLIQKESTMNTPVYPVPKPNGRWRMVLDYRAVNKVTPLIAVQNQHSYGILGSLFKGRYKTTIDLSNGFWAHPIVPEDYWITAFTWQGKQYCWTVLPQGFLNSPGLFTGDVVDLLQGIPNVEVYVDDVYISHDSEKEHLEYLDILFNRLKEAGYIISLKKSNIANSIVDFLGFQITNEGRGLTDTFKEKLENITAPTTLKQLQSILGLLNFARNFIPDFTELIAPLYALIPKSTKNYVPWQIEHSTTLETLITKLNGAEYLQGRKGDKTLIMKVNASYTTGYIRYYNEGEKKPISYVSIVFSKTELKFTELEKLLTTVHKGLLKALDLSMGQNIHVYSPIVSMQNIQKTPQTAKKALASRWLSWLSYLEDPRIRFFYDPQMPALKDLPAVDTGKDNKKHPSNFQHIFYTDGSAITSPTKEGHLNAGMGIVYFINKDGNLQKQQEWSISLGNHTAQFAEIAAFEFALKKCLPLGGNILVVTDSNYVAKAYNEELDVWASNGFVNNRKKPLKHISKWKSVADLKRLRPDVVVTHEPGHQKLDSSPHAYGNNLADQLATQASFKVHAGKRTADGSEFEKRTADGSEFESPKKKAKVE

SEQ ID NO: 7323 - protein, 2095 aa, synthetic construct
MPAAKRVKLDGGDKKYSIGLDIGTNSVGWAVITDEYKVPSKKFKVLGNTDRHSIKKNLIGALLFDSGETAEATRLKRTARRRYTRRKNRICYLQEIFSNEMAKVDDSFFHRLEESFLVEEDKKHERHPIFGNIVDEVAYHEKYPTIYHLRKKLVDSTDKADLRLIYLALAHMIKFRGHFLIEGDLNPDNSDVDKLFIQLVQTYNQLFEENPINASGVDAKAILSARLSKSRRLENLIAQLPGEKKNGLFGNLIALSLGLTPNFKSNFDLAEDAKLQLSKDTYDDDLDNLLAQIGDQYADLFLAAKNLSDAILLSDILRVNTEITKAPLSASMIKRYDEHHQDLTLLKALVRQQLPEKYKEIFFDQSKNGYAGYIDGGASQEEFYKFIKPILEKMDGTEELLVKLNREDLLRKQRTFDNGSIPHQIHLGELHAILRRQEDFYPFLKDNREKIEKILTFRIPYYVGPLARGNSRFAWMTRKSEETITPWNFEEVVDKGASAQSFIERMTNFDKNLPNEKVLPKHSLLYEYFTVYNELTKVKYVTEGMRKPAFLSGEQKKAIVDLLFKTNRKVTVKQLKEDYFKKIECFDSVEISGVEDRFNASLGTYHDLLKIIKDKDFLDNEENEDILEDIVLTLTLFEDREMIEERLKTYAHLFDDKVMKQLKRRRYTGWGRLSRKLINGIRDKQSGKTILDFLKSDGFANRNFMQLIHDDSLTFKEDIQKAQVSGQGDSLHEHIANLAGSPAIKKGILQTVKVVDELVKVMGRHKPENIVIEMARENQTTQKGQKNSRERMKRIEEGIKELGSQILKEHPVENTQLQNEKLYLYYLQNGRDMYVDQELDINRLSDYDVDHIVPQSFLKDDSIDNKVLTRSDKARGKSDNVPSEEVVKKMKNYWRQLLNAKLITQRKFDNLTKAERGGLSELDKAGFIKRQLVETRQITKHVAQILDSRMNTKYDENDKLIREVKVITLKSKLVSDFRKDFQFYKVREINNYHHAHDAYLNAVVGTALIKKYPKLESEFVYGDYKVYDVRKMIAKSEQEIGKATAKYFFYSNIMNFFKTEITLANGEIRKRPLIETNGETGEIVWDKGRDFATVRKVLSMPQVNIVKKTEVQTGGFSKESILPKRNSDKLIARKKDWDPKKYGGFDSPTVAYSVLVVAKVEKGKSKKLKSVKELLGITIMERSSFEKNPIDFLEAKGYKEVKKDLIIKLPKYSLFELENGRKRMLASAGELQKGNELALPSKYVNFLYLASHYEKLKGSPEDNEQKQLFVEQHKHYLDEIIEQISEFSKRVILADANLDKVLSAYNKHRDKPIREQAENIIHLFTLTNLGAPAAFKYFDTTIDRKRYTSTKEVLDATLIHQSITGLYETRIDLSQLGGDGGEAAAKGGGGSSGGTLQLEEEYRLFEPESTQKQEMDIWLKNFPQAWAETGGMGTAHCQAPVLIQLKATATPISIRQYPMPHEAYQGIKPHIRRMLDQGILKPCQSPWNTPLLPVKKPGTEDYRPVQDLREVNKRVEDIHPTVPNPYNLLSTLPPSHPWYTVLDLKDAFFCLRLHSESQLLFAFEWRDPEIGLSGQLTWTRLPQGFKNSPTLFNEALHSDLADFRVRYPALVLLQYVDDLLLAAATRTECLEGTKALLETLGNKGYRASAKKAQICLQEVTYLGYSLKDGQRWLTKARKEAILSIPVPKNSRQVREFLGTAGYCRLWIPGFAELAAPLYPLTRPGTLFQWGTEQQLAFEDIKKALLSSPALGLPDITKPFELFIDENSGFAKGVLVQKLGPWKRPVAYLSKKLDTVASGWPPCLRMVAAIAILVKDAGKLTLGQPLTILTSHPVEALVRQPPNKWLSNARMTHYQAMLLDAERVHFGPTVSLNPATLLPLPSGGNHHDCLQILAETHGTRPDLTDQPLPDADLTWYTDGSSFIRNGEREAGAAVTTESEVIWAAPLPPGTSAQRAELIALTQALKMAEGKKLTVYTDSRYAFATTHVHGEIYRRRGWLTSEGKEIKNKNEILALLEALFLPKRLSIIHCPGHQKGDSPQAKGNRLADDTAKKAATETHSSLTVLPAGKRTADGSEFEKRTADGSEFESPKKKAKVE

SEQ ID NO: 7324 - protein, 2095 aa, synthetic construct
MPAAKRVKLDGGDKKYSIGLDIGTNSVGWAVITDEYKVPSKKFKVLGNTDRHSIKKNLIGALLFDSGETAEATRLKRTARRRYTRRKNRICYLQEIFSNEMAKVDDSFFHRLEESFLVEEDKKHERHPIFGNIVDEVAYHEKYPTIYHLRKKLVDSTDKADLRLIYLALAHMIKFRGHFLIEGDLNPDNSDVDKLFIQLVQTYNQLFEENPINASGVDAKAILSARLSKSRRLENLIAQLPGEKKNGLFGNLIALSLGLTPNFKSNFDLAEDAKLQLSKDTYDDDLDNLLAQIGDQYADLFLAAKNLSDAILLSDILRVNTEITKAPLSASMIKRYDEHHQDLTLLKALVRQQLPEKYKEIFFDQSKNGYAGYIDGGASQEEFYKFIKPILEKMDGTEELLVKLNREDLLRKQRTFDNGSIPHQIHLGELHAILRRQEDFYPFLKDNREKIEKILTFRIPYYVGPLARGNSRFAWMTRKSEETITPWNFEEVVDKGASAQSFIERMTNFDKNLPNEKVLPKHSLLYEYFTVYNELTKVKYVTEGMRKPAFLSGEQKKAIVDLLFKTNRKVTVKQLKEDYFKKIECFDSVEISGVEDRFNASLGTYHDLLKIIKDKDFLDNEENEDILEDIVLTLTLFEDREMIEERLKTYAHLFDDKVMKQLKRRRYTGWGRLSRKLINGIRDKQSGKTILDFLKSDGFANRNFMQLIHDDSLTFKEDIQKAQVSGQGDSLHEHIANLAGSPAIKKGILQTVKVVDELVKVMGRHKPENIVIEMARENQTTQKGQKNSRERMKRIEEGIKELGSQILKEHPVENTQLQNEKLYLYYLQNGRDMYVDQELDINRLSDYDVDHIVPQSFLKDDSIDNKVLTRSDKARGKSDNVPSEEVVKKMKNYWRQLLNAKLITQRKFDNLTKAERGGLSELDKAGFIKRQLVETRQITKHVAQILDSRMNTKYDENDKLIREVKVITLKSKLVSDFRKDFQFYKVREINNYHHAHDAYLNAVVGTALIKKYPKLESEFVYGDYKVYDVRKMIAKSEQEIGKATAKYFFYSNIMNFFKTEITLANGEIRKRPLIETNGETGEIVWDKGRDFATVRKVLSMPQVNIVKKTEVQTGGFSKESILPKRNSDKLIARKKDWDPKKYGGFDSPTVAYSVLVVAKVEKGKSKKLKSVKELLGITIMERSSFEKNPIDFLEAKGYKEVKKDLIIKLPKYSLFELENGRKRMLASAGELQKGNELALPSKYVNFLYLASHYEKLKGSPEDNEQKQLFVEQHKHYLDEIIEQISEFSKRVILADANLDKVLSAYNKHRDKPIREQAENIIHLFTLTNLGAPAAFKYFDTTIDRKRYTSTKEVLDATLIHQSITGLYETRIDLSQLGGDGGEAAAKGGGGSSGGTLQLEEEYRLFEPESTQKQEMDIWLKNFPQAWAETGGMGTAHCQAPVLIQLKATATPISIRQYPMPHEAYQGIKPHIRRMLDQGILKPCQSPWNTPLLPVKKPGTEDYRPVQDLREVNKRVEDIHPTVPNPYNLLSTLPPSHPWYTVLDLKDAFFCLRLHSESQLLFAFEWRDPEIGLSGQLTWTRLPQGFKNSPTLFNEALHSDLADFRVRYPALVLLQYVDDLLLAAATRTECLEGTKALLETLGNKGYRASAKKAQICLQEVTYLGYSLKDGQRWLTKARKEAILSIPVPKNSRQVREFLGKAGYCRLFIPGFAELAAPLYPLTRPGTLFQWGTEQQLAFEDIKKALLSSPALGLPDITKPFELFIDENSGFAKGVLVQKLGPWKRPVAYLSKKLDTVASGWPPCLRMVAAIAILVKDAGKLTLGQPLTILTSHPVEALVRQPPNKWLSNARMTHYQAMLLDAERVHFGPTVSLNPATLLPLPSGGNHHDCLQILAETHGTRPDLTDQPLPDADLTWYTDGSSFIRNGEREAGAAVTTESEVIWAAPLPPGTSAQRAELIALTQALKMAEGKKLTVYTDSRYAFATTHVHGEIYRRRGWLTSEGKEIKNKNEILALLEALFLPKRLSIIHCPGHQKGDSPQAKGNRLADDTAKKAATETHSSLTVLPAGKRTADGSEFEKRTADGSEFESPKKKAKVE

SEQ ID NO: 7325 - protein, 2176 aa, synthetic construct
MPAAKRVKLDGGDKKYSIGLDIGTNSVGWAVITDEYKVPSKKFKVLGNTDRHSIKKNLIGALLFDSGETAEATRLKRTARRRYTRRKNRICYLQEIFSNEMAKVDDSFFHRLEESFLVEEDKKHERHPIFGNIVDEVAYHEKYPTIYHLRKKLVDSTDKADLRLIYLALAHMIKFRGHFLIEGDLNPDNSDVDKLFIQLVQTYNQLFEENPINASGVDAKAILSARLSKSRRLENLIAQLPGEKKNGLFGNLIALSLGLTPNFKSNFDLAEDAKLQLSKDTYDDDLDNLLAQIGDQYADLFLAAKNLSDAILLSDILRVNTEITKAPLSASMIKRYDEHHQDLTLLKALVRQQLPEKYKEIFFDQSKNGYAGYIDGGASQEEFYKFIKPILEKMDGTEELLVKLNREDLLRKQRTFDNGSIPHQIHLGELHAILRRQEDFYPFLKDNREKIEKILTFRIPYYVGPLARGNSRFAWMTRKSEETITPWNFEEVVDKGASAQSFIERMTNFDKNLPNEKVLPKHSLLYEYFTVYNELTKVKYVTEGMRKPAFLSGEQKKAIVDLLFKTNRKVTVKQLKEDYFKKIECFDSVEISGVEDRFNASLGTYHDLLKIIKDKDFLDNEENEDILEDIVLTLTLFEDREMIEERLKTYAHLFDDKVMKQLKRRRYTGWGRLSRKLINGIRDKQSGKTILDFLKSDGFANRNFMQLIHDDSLTFKEDIQKAQVSGQGDSLHEHIANLAGSPAIKKGILQTVKVVDELVKVMGRHKPENIVIEMARENQTTQKGQKNSRERMKRIEEGIKELGSQILKEHPVENTQLQNEKLYLYYLQNGRDMYVDQELDINRLSDYDVDHIVPQSFLKDDSIDNKVLTRSDKARGKSDNVPSEEVVKKMKNYWRQLLNAKLITQRKFDNLTKAERGGLSELDKAGFIKRQLVETRQITKHVAQILDSRMNTKYDENDKLIREVKVITLKSKLVSDFRKDFQFYKVREINNYHHAHDAYLNAVVGTALIKKYPKLESEFVYGDYKVYDVRKMIAKSEQEIGKATAKYFFYSNIMNFFKTEITLANGEIRKRPLIETNGETGEIVWDKGRDFATVRKVLSMPQVNIVKKTEVQTGGFSKESILPKRNSDKLIARKKDWDPKKYGGFDSPTVAYSVLVVAKVEKGKSKKLKSVKELLGITIMERSSFEKNPIDFLEAKGYKEVKKDLIIKLPKYSLFELENGRKRMLASAGELQKGNELALPSKYVNFLYLASHYEKLKGSPEDNEQKQLFVEQHKHYLDEIIEQISEFSKRVILADANLDKVLSAYNKHRDKPIREQAENIIHLFTLTNLGAPAAFKYFDTTIDRKRYTSTKEVLDATLIHQSITGLYETRIDLSQLGGDGGEAAAKGGGGSSGGMNPLQLLQPLPAEIKGTKLLAHWNSGATITCIPESFLEDEQPIKKTLIKTIHGEKQQNVYYVTFKVKGRKVEAEVIASPYEYILLSPTDVPWLTQQPLQLTILVPLQEYQEKILSKTALPEDQKQQLKTLFVKYDNLWQHWENQVGHRKIRPHNIATGDYPPRPQKQYPINPKAKPSIQIVIDDLLKQGVLTPQNSTMNTPVYPVPKPDGRWRMVLDYREVNKTIPLTAAQNQHSAGILATIVRQKYKTTLDLANGFWAHPITPESYWLTAFTWQGKQYCWTRLPQGFLNSPALFTADVVDLLKEIPNVQVYVDDIYLSHDDPKEHVQQLEKVFQILLQAGYVVSLKKSEIGQKTVEFLGFNITKEGRGLTDTFKTKLLNITPPKDLKQLQSILGLLNFARNFIPNFAELVQPLYNLIASAKGKYIEWSEENTKQLNMVIEALNTASNLEERLPEQRLVIKVNTSPSAGYVRYYNETGKKPIMYLNYVFSKAELKFSMLEKLLTTMHKALIKAMDLAMGQEILVYSPIVSMTKIQKTPLPERKALPIRWITWMTYLEDPRIQFHYDKTLPELKHIPDVYTSSQSPVKHPSQYEGVFYTDGSAIKSPDPTKSNNAGMGIVHATYKPEYQVLNQWSIPLGNHTAQMAEIAAVEFACKKALKIPGPVLVITDSFYVAESANKELPYWKSNGFVNNKKKPLKHISKWKSIAECLSMKPDITIQHEKGISLQIPVFILKGNALADKLATQGSYVVNAGKRTADGSEFEKRTADGSEFESPKKKAKVE

SEQ ID NO: 7326 - protein, 2094 aa, synthetic construct
MPAAKRVKLDGGDKKYSIGLDIGTNSVGWAVITDEYKVPSKKFKVLGNTDRHSIKKNLIGALLFDSGETAEATRLKRTARRRYTRRKNRICYLQEIFSNEMAKVDDSFFHRLEESFLVEEDKKHERHPIFGNIVDEVAYHEKYPTIYHLRKKLVDSTDKADLRLIYLALAHMIKFRGHFLIEGDLNPDNSDVDKLFIQLVQTYNQLFEENPINASGVDAKAILSARLSKSRRLENLIAQLPGEKKNGLFGNLIALSLGLTPNFKSNFDLAEDAKLQLSKDTYDDDLDNLLAQIGDQYADLFLAAKNLSDAILLSDILRVNTEITKAPLSASMIKRYDEHHQDLTLLKALVRQQLPEKYKEIFFDQSKNGYAGYIDGGASQEEFYKFIKPILEKMDGTEELLVKLNREDLLRKQRTFDNGSIPHQIHLGELHAILRRQEDFYPFLKDNREKIEKILTFRIPYYVGPLARGNSRFAWMTRKSEETITPWNFEEVVDKGASAQSFIERMTNFDKNLPNEKVLPKHSLLYEYFTVYNELTKVKYVTEGMRKPAFLSGEQKKAIVDLLFKTNRKVTVKQLKEDYFKKIECFDSVEISGVEDRFNASLGTYHDLLKIIKDKDFLDNEENEDILEDIVLTLTLFEDREMIEERLKTYAHLFDDKVMKQLKRRRYTGWGRLSRKLINGIRDKQSGKTILDFLKSDGFANRNFMQLIHDDSLTFKEDIQKAQVSGQGDSLHEHIANLAGSPAIKKGILQTVKVVDELVKVMGRHKPENIVIEMARENQTTQKGQKNSRERMKRIEEGIKELGSQILKEHPVENTQLQNEKLYLYYLQNGRDMYVDQELDINRLSDYDVDHIVPQSFLKDDSIDNKVLTRSDKARGKSDNVPSEEVVKKMKNYWRQLLNAKLITQRKFDNLTKAERGGLSELDKAGFIKRQLVETRQITKHVAQILDSRMNTKYDENDKLIREVKVITLKSKLVSDFRKDFQFYKVREINNYHHAHDAYLNAVVGTALIKKYPKLESEFVYGDYKVYDVRKMIAKSEQEIGKATAKYFFYSNIMNFFKTEITLANGEIRKRPLIETNGETGEIVWDKGRDFATVRKVLSMPQVNIVKKTEVQTGGFSKESILPKRNSDKLIARKKDWDPKKYGGFDSPTVAYSVLVVAKVEKGKSKKLKSVKELLGITIMERSSFEKNPIDFLEAKGYKEVKKDLIIKLPKYSLFELENGRKRMLASAGELQKGNELALPSKYVNFLYLASHYEKLKGSPEDNEQKQLFVEQHKHYLDEIIEQISEFSKRVILADANLDKVLSAYNKHRDKPIREQAENIIHLFTLTNLGAPAAFKYFDTTIDRKRYTSTKEVLDATLIHQSITGLYETRIDLSQLGGDGGEAAAKGGGGSSGGVLNLEEEYRLHEKPVPSSIDPSWLQLFPTVWAERAGMGLANQVPPVVVELRSGASPVAVRQYPMSKEAREGIRPHIQKFLDLGVLVPCRSPWNTPLLPVKKPGTNDYRPVQDLREINKRVQDIHPTVPNPYNLLSSLPPSYTWYSVLDLKDAFFCLRLHPNSQPLFAFEWKDPEKGNTGQLTWTRLPQGFKNSPTLFNEALHRDLAPFRALNPQVVLLQYVDDLLVAAPTYEDCKKGTQKLLQELSKLGYRVSAKKAQLCQREVTYLGYLLKEGKRWLTPARKATVMKIPVPTTPRQVREFLGTAGFCRLWIPGFASLAAPLYPLTKPSIPFIWTEEHQQAFDHIKKALLSAPALALPDLTKPFTLYIDERAGVARGVLTQTLGPWRRPVAYLSKKLDPVASGWPTCLKAVAAVALLLKDADKLTLGQNVTVIASHSLESIVRQPPDRWMTNARMTHYQSLLLNERVSFAPPAVLNPATLLPVESEATPVHRCSEILAEETGTRRDLEDQPLPGVPTWYTDGSSFITEGKRRAGAPIVDGKRTVWASSLPEGTSAQKAELVALTQALRLAEGKNINIYTDSRYAFATAHIHGAIYKQRGWLTSAGKDIKNKEEILALLEAIHLPRRVAIIHCPGHQRGSNPVATGNRRADEAAKQAALSTRVLAGTTKPAGKRTADGSEFEKRTADGSEFESPKKKAKVE

SEQ ID NO: 7327 - protein, 2218 aa, synthetic construct
MPAAKRVKLDGGDKKYSIGLDIGTNSVGWAVITDEYKVPSKKFKVLGNTDRHSIKKNLIGALLFDSGETAEATRLKRTARRRYTRRKNRICYLQEIFSNEMAKVDDSFFHRLEESFLVEEDKKHERHPIFGNIVDEVAYHEKYPTIYHLRKKLVDSTDKADLRLIYLALAHMIKFRGHFLIEGDLNPDNSDVDKLFIQLVQTYNQLFEENPINASGVDAKAILSARLSKSRRLENLIAQLPGEKKNGLFGNLIALSLGLTPNFKSNFDLAEDAKLQLSKDTYDDDLDNLLAQIGDQYADLFLAAKNLSDAILLSDILRVNTEITKAPLSASMIKRYDEHHQDLTLLKALVRQQLPEKYKEIFFDQSKNGYAGYIDGGASQEEFYKFIKPILEKMDGTEELLVKLNREDLLRKQRTFDNGSIPHQIHLGELHAILRRQEDFYPFLKDNREKIEKILTFRIPYYVGPLARGNSRFAWMTRKSEETITPWNFEEVVDKGASAQSFIERMTNFDKNLPNEKVLPKHSLLYEYFTVYNELTKVKYVTEGMRKPAFLSGEQKKAIVDLLFKTNRKVTVKQLKEDYFKKIECFDSVEISGVEDRFNASLGTYHDLLKIIKDKDFLDNEENEDILEDIVLTLTLFEDREMIEERLKTYAHLFDDKVMKQLKRRRYTGWGRLSRKLINGIRDKQSGKTILDFLKSDGFANRNFMQLIHDDSLTFKEDIQKAQVSGQGDSLHEHIANLAGSPAIKKGILQTVKVVDELVKVMGRHKPENIVIEMARENQTTQKGQKNSRERMKRIEEGIKELGSQILKEHPVENTQLQNEKLYLYYLQNGRDMYVDQELDINRLSDYDVDHIVPQSFLKDDSIDNKVLTRSDKARGKSDNVPSEEVVKKMKNYWRQLLNAKLITQRKFDNLTKAERGGLSELDKAGFIKRQLVETRQITKHVAQILDSRMNTKYDENDKLIREVKVITLKSKLVSDFRKDFQFYKVREINNYHHAHDAYLNAVVGTALIKKYPKLESEFVYGDYKVYDVRKMIAKSEQEIGKATAKYFFYSNIMNFFKTEITLANGEIRKRPLIETNGETGEIVWDKGRDFATVRKVLSMPQVNIVKKTEVQTGGFSKESILPKRNSDKLIARKKDWDPKKYGGFDSPTVAYSVLVVAKVEKGKSKKLKSVKELLGITIMERSSFEKNPIDFLEAKGYKEVKKDLIIKLPKYSLFELENGRKRMLASAGELQKGNELALPSKYVNFLYLASHYEKLKGSPEDNEQKQLFVEQHKHYLDEIIEQISEFSKRVILADANLDKVLSAYNKHRDKPIREQAENIIHLFTLTNLGAPAAFKYFDTTIDRKRYTSTKEVLDATLIHQSITGLYETRIDLSQLGGDGGEAAAKGGGGSSGGTLGDQGSRGSDPLPEPRVTLTVEGIPTEFLVNTGAEHSVLTKPMGKMGSKRTVVAGATGSKVYPWTTKRLLKIGQKQVTHSFLVIPECPAPLLGRDLLTKLKAQIQFSTEGPQVTWEDRPAMCLVLNLEEEYRLHEKPVPPSIDPSWLQLFPMVWAEKAGMGLANQVPPVVVELKSDASPVAVRQYPMSKEAREGIRPHIQRFLDLGILVPCQSPWNTPLLPVKKPGTNDYRPVQDLREVNKRVQDIHPTVPNPYNLLSSLPPSHTWYSVLDLKDAFFCLKLHPNSQPLFAFEWRDPEKGNTGQLTWTRLPQGFKNSPTLFNEALHRDLASFRALNPQVVMLQYVDDLLVAAPTYRDCKEGTRRLLQELSKLGYRVSAKKAQLCREEVTYLGYLLKGGKRWLTPARKATVMKIPTPTTPRQVREFLGTAGFCRLWIPGFASLAAPLYPLTRPKVPFTWTEAHQEAFGRIKEALLSAPALALPDLTKPFALYVDEKEGVARGVLTQTLGPWRRPVAYLSKKLDPVASGWPTCLKAIAAVALLLKDADKLTLGQNVLVIAPHNLESIVRQPPDRWMTNARMTHYQSLLLNERVSFAPPAILNPATLLPVESDDTPIHICSEILAEETGTRPDLRDQPLPGVPAWYTDGSSFIMDGRRQAGAAIVDNKRTVWASNLPEGTSAQKAELIALTQALRLAEGKSINIYTDSRYAFATAHVHGAIYKQRGWLTSAGKDIKNKEEILALLEAIHLPKRVAIIHCPGHQRGTDPVATGNRKADEAAKQAAQSTRILTETTKNAGKRTADGSEFEKRTADGSEFESPKKKAKVE

SEQ ID NO: 7328 - protein, 2096 aa, synthetic construct
MPAAKRVKLDGGDKKYSIGLDIGTNSVGWAVITDEYKVPSKKFKVLGNTDRHSIKKNLIGALLFDSGETAEATRLKRTARRRYTRRKNRICYLQEIFSNEMAKVDDSFFHRLEESFLVEEDKKHERHPIFGNIVDEVAYHEKYPTIYHLRKKLVDSTDKADLRLIYLALAHMIKFRGHFLIEGDLNPDNSDVDKLFIQLVQTYNQLFEENPINASGVDAKAILSARLSKSRRLENLIAQLPGEKKNGLFGNLIALSLGLTPNFKSNFDLAEDAKLQLSKDTYDDDLDNLLAQIGDQYADLFLAAKNLSDAILLSDILRVNTEITKAPLSASMIKRYDEHHQDLTLLKALVRQQLPEKYKEIFFDQSKNGYAGYIDGGASQEEFYKFIKPILEKMDGTEELLVKLNREDLLRKQRTFDNGSIPHQIHLGELHAILRRQEDFYPFLKDNREKIEKILTFRIPYYVGPLARGNSRFAWMTRKSEETITPWNFEEVVDKGASAQSFIERMTNFDKNLPNEKVLPKHSLLYEYFTVYNELTKVKYVTEGMRKPAFLSGEQKKAIVDLLFKTNRKVTVKQLKEDYFKKIECFDSVEISGVEDRFNASLGTYHDLLKIIKDKDFLDNEENEDILEDIVLTLTLFEDREMIEERLKTYAHLFDDKVMKQLKRRRYTGWGRLSRKLINGIRDKQSGKTILDFLKSDGFANRNFMQLIHDDSLTFKEDIQKAQVSGQGDSLHEHIANLAGSPAIKKGILQTVKVVDELVKVMGRHKPENIVIEMARENQTTQKGQKNSRERMKRIEEGIKELGSQILKEHPVENTQLQNEKLYLYYLQNGRDMYVDQELDINRLSDYDVDHIVPQSFLKDDSIDNKVLTRSDKARGKSDNVPSEEVVKKMKNYWRQLLNAKLITQRKFDNLTKAERGGLSELDKAGFIKRQLVETRQITKHVAQILDSRMNTKYDENDKLIREVKVITLKSKLVSDFRKDFQFYKVREINNYHHAHDAYLNAVVGTALIKKYPKLESEFVYGDYKVYDVRKMIAKSEQEIGKATAKYFFYSNIMNFFKTEITLANGEIRKRPLIETNGETGEIVWDKGRDFATVRKVLSMPQVNIVKKTEVQTGGFSKESILPKRNSDKLIARKKDWDPKKYGGFDSPTVAYSVLVVAKVEKGKSKKLKSVKELLGITIMERSSFEKNPIDFLEAKGYKEVKKDLIIKLPKYSLFELENGRKRMLASAGELQKGNELALPSKYVNFLYLASHYEKLKGSPEDNEQKQLFVEQHKHYLDEIIEQISEFSKRVILADANLDKVLSAYNKHRDKPIREQAENIIHLFTLTNLGAPAAFKYFDTTIDRKRYTSTKEVLDATLIHQSITGLYETRIDLSQLGGDGGEAAAKGGGGSSGGTLGIEDEYRLHETSTEPDVSLGSTWLSDFPQAWAETGGMGLAVRQAPLIIPLKATSTPVSIQQYPMSHEARLGIKPHIQRLLDQGILVPCQSPWNTPLLPVKKPGTNDYRPVQDLREVNKRVEDIHPTVPNPYNLLSGLPPSHQWYTVLDLKDAFFCLRLHPTSQPLFAFEWRDPGMGISGQLTWTRLPQGFKNSPTLFNEALHRDLADFRIQHPDLILLQYVDDILLAATSELDCQQGTRALLQTLGDLGYRASAKKAQICQKQVKYLGYLLREGQRWLTEARKETVMGQPVPKTPRQLREFLGTAGFCRLWIPGFAEMAAPLYPLTKPGTLFSWGPDQQKAYQEIKQALLTAPALGLPDLTKPFELFVDEKQGYAKGVLTQKLGPWRRPVAYLSKKLDPVAAGWPPCLRMVAAIAVLTKDAGKLTMGQPLVILAPHAVEALVKQPPDRWLSNARMTHYQAMLLDTDRVQFGPVVALNPATLLPLPEEGAPHDCLEILAETHGTRPDLTDQPIPDADHTWYTDGSSFLQEGQRKAGAAVTTETEVIWAGALPAGTSAQRAELIALTQALKMAEGKRLNVYTDSRYAFATAHIHGEIYRRRGWLTSEGREIKNKSEILALLKALFLPKRLSIIHCLGHQKGDSAEARGNRLADQAAREAAIKTPPDTSTLLAGKRTADGSEFEKRTADGSEFESPKKKAKVE

SEQ ID NO: 7329 - protein, 2096 aa, synthetic construct
MPAAKRVKLDGGDKKYSIGLDIGTNSVGWAVITDEYKVPSKKFKVLGNTDRHSIKKNLIGALLFDSGETAEATRLKRTARRRYTRRKNRICYLQEIFSNEMAKVDDSFFHRLEESFLVEEDKKHERHPIFGNIVDEVAYHEKYPTIYHLRKKLVDSTDKADLRLIYLALAHMIKFRGHFLIEGDLNPDNSDVDKLFIQLVQTYNQLFEENPINASGVDAKAILSARLSKSRRLENLIAQLPGEKKNGLFGNLIALSLGLTPNFKSNFDLAEDAKLQLSKDTYDDDLDNLLAQIGDQYADLFLAAKNLSDAILLSDILRVNTEITKAPLSASMIKRYDEHHQDLTLLKALVRQQLPEKYKEIFFDQSKNGYAGYIDGGASQEEFYKFIKPILEKMDGTEELLVKLNREDLLRKQRTFDNGSIPHQIHLGELHAILRRQEDFYPFLKDNREKIEKILTFRIPYYVGPLARGNSRFAWMTRKSEETITPWNFEEVVDKGASAQSFIERMTNFDKNLPNEKVLPKHSLLYEYFTVYNELTKVKYVTEGMRKPAFLSGEQKKAIVDLLFKTNRKVTVKQLKEDYFKKIECFDSVEISGVEDRFNASLGTYHDLLKIIKDKDFLDNEENEDILEDIVLTLTLFEDREMIEERLKTYAHLFDDKVMKQLKRRRYTGWGRLSRKLINGIRDKQSGKTILDFLKSDGFANRNFMQLIHDDSLTFKEDIQKAQVSGQGDSLHEHIANLAGSPAIKKGILQTVKVVDELVKVMGRHKPENIVIEMARENQTTQKGQKNSRERMKRIEEGIKELGSQILKEHPVENTQLQNEKLYLYYLQNGRDMYVDQELDINRLSDYDVDHIVPQSFLKDDSIDNKVLTRSDKARGKSDNVPSEEVVKKMKNYWRQLLNAKLITQRKFDNLTKAERGGLSELDKAGFIKRQLVETRQITKHVAQILDSRMNTKYDENDKLIREVKVITLKSKLVSDFRKDFQFYKVREINNYHHAHDAYLNAVVGTALIKKYPKLESEFVYGDYKVYDVRKMIAKSEQEIGKATAKYFFYSNIMNFFKTEITLANGEIRKRPLIETNGETGEIVWDKGRDFATVRKVLSMPQVNIVKKTEVQTGGFSKESILPKRNSDKLIARKKDWDPKKYGGFDSPTVAYSVLVVAKVEKGKSKKLKSVKELLGITIMERSSFEKNPIDFLEAKGYKEVKKDLIIKLPKYSLFELENGRKRMLASAGELQKGNELALPSKYVNFLYLASHYEKLKGSPEDNEQKQLFVEQHKHYLDEIIEQISEFSKRVILADANLDKVLSAYNKHRDKPIREQAENIIHLFTLTNLGAPAAFKYFDTTIDRKRYTSTKEVLDATLIHQSITGLYETRIDLSQLGGDGGEAAAKGGGGSSGGTLNIEDEYRLHETSKGPDVPLGSTWLSDFPQAWAETGGMGLAVRQAPLIIPLKATSTPVSIKQYPMSQEARLGIKPHIQRLLDQGILVPCQSPWNTPLLPVKKPGTNDYRPVQDLREVNKRVEDIHPTVPNPYNLLSGLPPSHQWYTVLDLKDAFFCLRLHPTSQSLFAFEWRDPEMGISGQLTWTRLPQGFKNSPTLFNEALHRDLADFRIQHPDLILLQYVDDLLLAATSELDCQQGTRALLQTLGDLGYRASAKKAQICQKQVKYLGYLLKEGQRWLTEARKETVMGQPTPKTPRQLREFLGKAGFCRLFIPGFAEMAAPLYPLTKPGTLFEWGPDQQKAYQEIKQALLTAPALGLPDLTKPFELFVDEKQGYAKGVLTQKLGPWRRPVAYLSKKLDPVAAGWPPCLRMVAAIAVLTKDAGKLTMGQPLVILAPHAVEALVKQPPDRWLSNARMTHYQALLLDTDRVQFGPIVALNPATLLPLPEEGLQHDCLDILAEAHGTRPDLTDQPLPDADHTWYTDGSSFLQEGQRKAGAAVTTETEVVWAKALPAGTSAQRAELIALTQALKMAEGKKLNVYTDSRYAFATAHIHGEIYRRRGWLTSEGKEIKNKDEILALLKALFLPKRLSIIHCPGHQKGNRAEARGNRMADQAAREVATRETPETSTLLAGKRTADGSEFEKRTADGSEFESPKKKAKVE

SEQ ID NO: 7330 - protein, 2096 aa, synthetic construct
MPAAKRVKLDGGDKKYSIGLDIGTNSVGWAVITDEYKVPSKKFKVLGNTDRHSIKKNLIGALLFDSGETAEATRLKRTARRRYTRRKNRICYLQEIFSNEMAKVDDSFFHRLEESFLVEEDKKHERHPIFGNIVDEVAYHEKYPTIYHLRKKLVDSTDKADLRLIYLALAHMIKFRGHFLIEGDLNPDNSDVDKLFIQLVQTYNQLFEENPINASGVDAKAILSARLSKSRRLENLIAQLPGEKKNGLFGNLIALSLGLTPNFKSNFDLAEDAKLQLSKDTYDDDLDNLLAQIGDQYADLFLAAKNLSDAILLSDILRVNTEITKAPLSASMIKRYDEHHQDLTLLKALVRQQLPEKYKEIFFDQSKNGYAGYIDGGASQEEFYKFIKPILEKMDGTEELLVKLNREDLLRKQRTFDNGSIPHQIHLGELHAILRRQEDFYPFLKDNREKIEKILTFRIPYYVGPLARGNSRFAWMTRKSEETITPWNFEEVVDKGASAQSFIERMTNFDKNLPNEKVLPKHSLLYEYFTVYNELTKVKYVTEGMRKPAFLSGEQKKAIVDLLFKTNRKVTVKQLKEDYFKKIECFDSVEISGVEDRFNASLGTYHDLLKIIKDKDFLDNEENEDILEDIVLTLTLFEDREMIEERLKTYAHLFDDKVMKQLKRRRYTGWGRLSRKLINGIRDKQSGKTILDFLKSDGFANRNFMQLIHDDSLTFKEDIQKAQVSGQGDSLHEHIANLAGSPAIKKGILQTVKVVDELVKVMGRHKPENIVIEMARENQTTQKGQKNSRERMKRIEEGIKELGSQILKEHPVENTQLQNEKLYLYYLQNGRDMYVDQELDINRLSDYDVDHIVPQSFLKDDSIDNKVLTRSDKARGKSDNVPSEEVVKKMKNYWRQLLNAKLITQRKFDNLTKAERGGLSELDKAGFIKRQLVETRQITKHVAQILDSRMNTKYDENDKLIREVKVITLKSKLVSDFRKDFQFYKVREINNYHHAHDAYLNAVVGTALIKKYPKLESEFVYGDYKVYDVRKMIAKSEQEIGKATAKYFFYSNIMNFFKTEITLANGEIRKRPLIETNGETGEIVWDKGRDFATVRKVLSMPQVNIVKKTEVQTGGFSKESILPKRNSDKLIARKKDWDPKKYGGFDSPTVAYSVLVVAKVEKGKSKKLKSVKELLGITIMERSSFEKNPIDFLEAKGYKEVKKDLIIKLPKYSLFELENGRKRMLASAGELQKGNELALPSKYVNFLYLASHYEKLKGSPEDNEQKQLFVEQHKHYLDEIIEQISEFSKRVILADANLDKVLSAYNKHRDKPIREQAENIIHLFTLTNLGAPAAFKYFDTTIDRKRYTSTKEVLDATLIHQSITGLYETRIDLSQLGGDGGEAAAKGGGGSSGGTLNIEDEHRLHETSKEPDVSLGSTWLSDFPQAWAETGGMGLAVRQAPLIIPLKATSTPVSIKQYPMSQEARLGIKPHIQRLLDQGILVPCQSPWNTPLLPVKKPGTNDYRPVQDLREVNKRVEDIHPTVPNPYNLLSGLPPSHQWYTVLDLKDAFFCLRLHPTSQPLFAFEWRDPEMGISGQLTWTRLPQGFKNSPTLFDEALHRDLADFRIQHPDLILLQYVDDLLLAATSELDCQQGTRALLQTLGNLGYRASAKKAQICQKQVKYLGYLLKEGQRWLTEARKETVMGQPTPKTPRQLREFLGTAGFCRLWIPGFAEMAAPLYPLTKTGTLFNWGPDQQKAYQEIKQALLTAPALGLPDLTKPFELFVDEKQGYAKGVLTQKLGPWRRPVAYLSKKLDPVAAGWPPCLRMVAAIAVLTKDAGKLTMGQPLVILAPHAVEALVKQPPDRWLSNARMTHYQALLLDTDRVQFGPVVALNPATLLPLPEEGLQHNCLDILAEAHGTRPDLTDQPLPDADHTWYTDGSSLLQEGQRKAGAAVTTETEVIWAKALPAGTSAQRAELIALTQALKMAEGKKLNVYTDSRYAFATAHIHGEIYRRRGLLTSEGKEIKNKDEILALLKALFLPKRLSIIHCPGHQKGHSAEARGNRMADQAARKAAITETPDTSTLLAGKRTADGSEFEKRTADGSEFESPKKKAKVE

SEQ ID NO: 7331 - protein, 2096 aa, synthetic construct
MPAAKRVKLDGGDKKYSIGLDIGTNSVGWAVITDEYKVPSKKFKVLGNTDRHSIKKNLIGALLFDSGETAEATRLKRTARRRYTRRKNRICYLQEIFSNEMAKVDDSFFHRLEESFLVEEDKKHERHPIFGNIVDEVAYHEKYPTIYHLRKKLVDSTDKADLRLIYLALAHMIKFRGHFLIEGDLNPDNSDVDKLFIQLVQTYNQLFEENPINASGVDAKAILSARLSKSRRLENLIAQLPGEKKNGLFGNLIALSLGLTPNFKSNFDLAEDAKLQLSKDTYDDDLDNLLAQIGDQYADLFLAAKNLSDAILLSDILRVNTEITKAPLSASMIKRYDEHHQDLTLLKALVRQQLPEKYKEIFFDQSKNGYAGYIDGGASQEEFYKFIKPILEKMDGTEELLVKLNREDLLRKQRTFDNGSIPHQIHLGELHAILRRQEDFYPFLKDNREKIEKILTFRIPYYVGPLARGNSRFAWMTRKSEETITPWNFEEVVDKGASAQSFIERMTNFDKNLPNEKVLPKHSLLYEYFTVYNELTKVKYVTEGMRKPAFLSGEQKKAIVDLLFKTNRKVTVKQLKEDYFKKIECFDSVEISGVEDRFNASLGTYHDLLKIIKDKDFLDNEENEDILEDIVLTLTLFEDREMIEERLKTYAHLFDDKVMKQLKRRRYTGWGRLSRKLINGIRDKQSGKTILDFLKSDGFANRNFMQLIHDDSLTFKEDIQKAQVSGQGDSLHEHIANLAGSPAIKKGILQTVKVVDELVKVMGRHKPENIVIEMARENQTTQKGQKNSRERMKRIEEGIKELGSQILKEHPVENTQLQNEKLYLYYLQNGRDMYVDQELDINRLSDYDVDHIVPQSFLKDDSIDNKVLTRSDKARGKSDNVPSEEVVKKMKNYWRQLLNAKLITQRKFDNLTKAERGGLSELDKAGFIKRQLVETRQITKHVAQILDSRMNTKYDENDKLIREVKVITLKSKLVSDFRKDFQFYKVREINNYHHAHDAYLNAVVGTALIKKYPKLESEFVYGDYKVYDVRKMIAKSEQEIGKATAKYFFYSNIMNFFKTEITLANGEIRKRPLIETNGETGEIVWDKGRDFATVRKVLSMPQVNIVKKTEVQTGGFSKESILPKRNSDKLIARKKDWDPKKYGGFDSPTVAYSVLVVAKVEKGKSKKLKSVKELLGITIMERSSFEKNPIDFLEAKGYKEVKKDLIIKLPKYSLFELENGRKRMLASAGELQKGNELALPSKYVNFLYLASHYEKLKGSPEDNEQKQLFVEQHKHYLDEIIEQISEFSKRVILADANLDKVLSAYNKHRDKPIREQAENIIHLFTLTNLGAPAAFKYFDTTIDRKRYTSTKEVLDATLIHQSITGLYETRIDLSQLGGDGGEAAAKGGGGSSGGTLNIEDEYRLHEISTEPDVSPGSTWLSDFPQAWAETGGMGLAVRQAPLIIPLKATSTPVSIKQYPMSQEAKLGIKPHIQRLLDQGILVPCQSPWNTPLLPVKKPGTNDYRPVQGLREVNKRVEDIHPTVPNPYNLLSGLPTSHRWYTVLDLKDAFFCLRLHPTSQPLFASEWRDPGMGISGQLTWTRLPQGFKNSPTLFNEALHRGLADFRIQHPDLILLQYVDDLLLAATSELDCQQGTRALLKTLGNLGYRASAKKAQICQKQVKYLGYLLREGQRWLTEARKETVMGQPTPKTPRQLREFLGTAGFCRLWIPRFAEMAAPLYPLTKPGTLFNWGPDQQKAYHEIKQALLTAPALGLPDLTKPFELFVDEKQGYAKGVLTQKLGPWRRPVAYLSKKLDPVAAGWPPCLRMVAAIAVLTKDAGKLTMGQPLVILAPHAVEALVKQPPDRWLSNARMTHYQAMLLDTDRVQFGPVVALNPATLLPLPEEGAPHDCLEILAETHGTEPDLTDQPIPDADHTWYTDGSSFLQEGQRKAGAAVTTETEVIWARALPAGTSAQRAELIALTQALKMAEGKRLNVYTDSRYAFATAHIHGEIYKRRGWLTSEGREIKNKSEILALLKALFLPKRLSIIHCLGHQKGDSAEARGNRLADQAAREAAIKTPPDTSTLLAGKRTADGSEFEKRTADGSEFESPKKKAKVE

SEQ ID NO: 7332 - protein, 2087 aa, synthetic construct
MPAAKRVKLDGGDKKYSIGLDIGTNSVGWAVITDEYKVPSKKFKVLGNTDRHSIKKNLIGALLFDSGETAEATRLKRTARRRYTRRKNRICYLQEIFSNEMAKVDDSFFHRLEESFLVEEDKKHERHPIFGNIVDEVAYHEKYPTIYHLRKKLVDSTDKADLRLIYLALAHMIKFRGHFLIEGDLNPDNSDVDKLFIQLVQTYNQLFEENPINASGVDAKAILSARLSKSRRLENLIAQLPGEKKNGLFGNLIALSLGLTPNFKSNFDLAEDAKLQLSKDTYDDDLDNLLAQIGDQYADLFLAAKNLSDAILLSDILRVNTEITKAPLSASMIKRYDEHHQDLTLLKALVRQQLPEKYKEIFFDQSKNGYAGYIDGGASQEEFYKFIKPILEKMDGTEELLVKLNREDLLRKQRTFDNGSIPHQIHLGELHAILRRQEDFYPFLKDNREKIEKILTFRIPYYVGPLARGNSRFAWMTRKSEETITPWNFEEVVDKGASAQSFIERMTNFDKNLPNEKVLPKHSLLYEYFTVYNELTKVKYVTEGMRKPAFLSGEQKKAIVDLLFKTNRKVTVKQLKEDYFKKIECFDSVEISGVEDRFNASLGTYHDLLKIIKDKDFLDNEENEDILEDIVLTLTLFEDREMIEERLKTYAHLFDDKVMKQLKRRRYTGWGRLSRKLINGIRDKQSGKTILDFLKSDGFANRNFMQLIHDDSLTFKEDIQKAQVSGQGDSLHEHIANLAGSPAIKKGILQTVKVVDELVKVMGRHKPENIVIEMARENQTTQKGQKNSRERMKRIEEGIKELGSQILKEHPVENTQLQNEKLYLYYLQNGRDMYVDQELDINRLSDYDVDHIVPQSFLKDDSIDNKVLTRSDKARGKSDNVPSEEVVKKMKNYWRQLLNAKLITQRKFDNLTKAERGGLSELDKAGFIKRQLVETRQITKHVAQILDSRMNTKYDENDKLIREVKVITLKSKLVSDFRKDFQFYKVREINNYHHAHDAYLNAVVGTALIKKYPKLESEFVYGDYKVYDVRKMIAKSEQEIGKATAKYFFYSNIMNFFKTEITLANGEIRKRPLIETNGETGEIVWDKGRDFATVRKVLSMPQVNIVKKTEVQTGGFSKESILPKRNSDKLIARKKDWDPKKYGGFDSPTVAYSVLVVAKVEKGKSKKLKSVKELLGITIMERSSFEKNPIDFLEAKGYKEVKKDLIIKLPKYSLFELENGRKRMLASAGELQKGNELALPSKYVNFLYLASHYEKLKGSPEDNEQKQLFVEQHKHYLDEIIEQISEFSKRVILADANLDKVLSAYNKHRDKPIREQAENIIHLFTLTNLGAPAAFKYFDTTIDRKRYTSTKEVLDATLIHQSITGLYETRIDLSQLGGDGGEAAAKGGGGSSGGIPWLMKKPLQLTTLVPLQEYEERLLKQTMLTGSYKEKLQSLFLKYDALWQHWENQVGHRRIKPHHIATGTVNPRPQKQYPINPKAKASIQTVINDLLKQGVLIQQNSIMNTPVYPVPKPDGKWRMVLDYREVNKTIPLIAAQNQHSAGILSSIFRGKYKTTLDLSNGFWAHSITPESYWLTAFTWLGQQYCWTRLPQGFLNSPALFNADVVDLLKEVPNVQVYVDDIYISHDDPREHLEQLEKVFSLLLNAGYVVSLKKSEIAQHEVEFLGFNITKEGRGLTETFKQKLLNITPPRDLKQLQSILGLLNFARNFIPNFSELVKPLYNIIATAPGKYITWTTDNSQQLQNIISMLNSAENLEERNPEVRLIMKVNTSPSAGYIRFYNEFAKRPIMYLNYVYTKAEVKFTNTEKLLTTIHKGLIKALDLGMGQEILVYSPIVSMTKIQKTPLPERKALPIRWITWMSYLEDPRIQFHYDKTLPELQQVPTVTDDIIAKIKHPSEFSMVFYTDGSAIKHPNVNKSHNAGMGIAQVQFKPEFTVINTWSIPLGDHTAQLAEVAAVEFACKKALKIDGPVLIVTDSFYVAESVNKELPYWQSNGFFNNKKKPLKHVSKWKSIADCIQLKPDIIIIHEKGHQPTASTFHTEGNNLADKLATQGSYVVNAGKRTADGSEFEKRTADGSEFESPKKKAKVE

SEQ ID NO: 7333 - protein, 2176 aa, synthetic construct
MPAAKRVKLDGGDKKYSIGLDIGTNSVGWAVITDEYKVPSKKFKVLGNTDRHSIKKNLIGALLFDSGETAEATRLKRTARRRYTRRKNRICYLQEIFSNEMAKVDDSFFHRLEESFLVEEDKKHERHPIFGNIVDEVAYHEKYPTIYHLRKKLVDSTDKADLRLIYLALAHMIKFRGHFLIEGDLNPDNSDVDKLFIQLVQTYNQLFEENPINASGVDAKAILSARLSKSRRLENLIAQLPGEKKNGLFGNLIALSLGLTPNFKSNFDLAEDAKLQLSKDTYDDDLDNLLAQIGDQYADLFLAAKNLSDAILLSDILRVNTEITKAPLSASMIKRYDEHHQDLTLLKALVRQQLPEKYKEIFFDQSKNGYAGYIDGGASQEEFYKFIKPILEKMDGTEELLVKLNREDLLRKQRTFDNGSIPHQIHLGELHAILRRQEDFYPFLKDNREKIEKILTFRIPYYVGPLARGNSRFAWMTRKSEETITPWNFEEVVDKGASAQSFIERMTNFDKNLPNEKVLPKHSLLYEYFTVYNELTKVKYVTEGMRKPAFLSGEQKKAIVDLLFKTNRKVTVKQLKEDYFKKIECFDSVEISGVEDRFNASLGTYHDLLKIIKDKDFLDNEENEDILEDIVLTLTLFEDREMIEERLKTYAHLFDDKVMKQLKRRRYTGWGRLSRKLINGIRDKQSGKTILDFLKSDGFANRNFMQLIHDDSLTFKEDIQKAQVSGQGDSLHEHIANLAGSPAIKKGILQTVKVVDELVKVMGRHKPENIVIEMARENQTTQKGQKNSRERMKRIEEGIKELGSQILKEHPVENTQLQNEKLYLYYLQNGRDMYVDQELDINRLSDYDVDHIVPQSFLKDDSIDNKVLTRSDKARGKSDNVPSEEVVKKMKNYWRQLLNAKLITQRKFDNLTKAERGGLSELDKAGFIKRQLVETRQITKHVAQILDSRMNTKYDENDKLIREVKVITLKSKLVSDFRKDFQFYKVREINNYHHAHDAYLNAVVGTALIKKYPKLESEFVYGDYKVYDVRKMIAKSEQEIGKATAKYFFYSNIMNFFKTEITLANGEIRKRPLIETNGETGEIVWDKGRDFATVRKVLSMPQVNIVKKTEVQTGGFSKESILPKRNSDKLIARKKDWDPKKYGGFDSPTVAYSVLVVAKVEKGKSKKLKSVKELLGITIMERSSFEKNPIDFLEAKGYKEVKKDLIIKLPKYSLFELENGRKRMLASAGELQKGNELALPSKYVNFLYLASHYEKLKGSPEDNEQKQLFVEQHKHYLDEIIEQISEFSKRVILADANLDKVLSAYNKHRDKPIREQAENIIHLFTLTNLGAPAAFKYFDTTIDRKRYTSTKEVLDATLIHQSITGLYETRIDLSQLGGDGGEAAAKGGGGSSGGMDPLQLLQPLEAEIKGTKLKAHWNSGATITCVPQAFLEEEVPIKNIWIKTIHGEKEQPVYYLTFKIQGRKVEAEVISSPYDYILVSPSDIPWLMKKPLQLTTLVPLQEYEERLLKQTMLTGSYKEKLQSLFLKYDALWQHWENQVGHRRIKPHHIATGTVNPRPQKQYPINPKAKASIQTVINDLLKQGVLIQQNSIMNTPVYPVPKPDGKWRMVLDYREVNKTIPLIAAQNQHSAGILSSIFRGKYKTTLDLSNGFWAHSITPESYWLTAFTWLGQQYCWTRLPQGFLNSPALFNADVVDLLKEVPNVQVYVDDIYISHDDPREHLEQLEKVFSLLLNAGYVVSLKKSEIAQHEVEFLGFNITKEGRGLTETFKQKLLNITPPRDLKQLQSILGKLNFARNFIPNFSELVKPLYNIIATAPGKYITWTTDNSQQLQNIISMLNSAENLEERNPEVRLIMKVNTSPSAGYIRFYNEFAKRPIMYLNYVYTKAEVKFTNTEKLLTTIHKGLIKALDLGMGQEILVYSPIVSMTKIQKTPLPERKALPIRWITWMSYLEDPRIQFHYDKTLPELQQVPTVTDDIIAKIKHPSEFSMVFYTDGSAIKHPNVNKSHNAGMGIAQVQFKPEFTVINTWSIPLGDHTAQLAEVAAVEFACKKALKIDGPVLIVTDSFYVAESVNKELPYWQSNGFFNNKKKPLKHVSKWKSIADCIQLKPDIIIIHEKGHQPTASTFHTEGNNLADKLATQGSYVVNAGKRTADGSEFEKRTADGSEFESPKKKAKVE

SEQ ID NO: 7334 - protein, 2087 aa, synthetic construct
MPAAKRVKLDGGDKKYSIGLDIGTNSVGWAVITDEYKVPSKKFKVLGNTDRHSIKKNLIGALLFDSGETAEATRLKRTARRRYTRRKNRICYLQEIFSNEMAKVDDSFFHRLEESFLVEEDKKHERHPIFGNIVDEVAYHEKYPTIYHLRKKLVDSTDKADLRLIYLALAHMIKFRGHFLIEGDLNPDNSDVDKLFIQLVQTYNQLFEENPINASGVDAKAILSARLSKSRRLENLIAQLPGEKKNGLFGNLIALSLGLTPNFKSNFDLAEDAKLQLSKDTYDDDLDNLLAQIGDQYADLFLAAKNLSDAILLSDILRVNTEITKAPLSASMIKRYDEHHQDLTLLKALVRQQLPEKYKEIFFDQSKNGYAGYIDGGASQEEFYKFIKPILEKMDGTEELLVKLNREDLLRKQRTFDNGSIPHQIHLGELHAILRRQEDFYPFLKDNREKIEKILTFRIPYYVGPLARGNSRFAWMTRKSEETITPWNFEEVVDKGASAQSFIERMTNFDKNLPNEKVLPKHSLLYEYFTVYNELTKVKYVTEGMRKPAFLSGEQKKAIVDLLFKTNRKVTVKQLKEDYFKKIECFDSVEISGVEDRFNASLGTYHDLLKIIKDKDFLDNEENEDILEDIVLTLTLFEDREMIEERLKTYAHLFDDKVMKQLKRRRYTGWGRLSRKLINGIRDKQSGKTILDFLKSDGFANRNFMQLIHDDSLTFKEDIQKAQVSGQGDSLHEHIANLAGSPAIKKGILQTVKVVDELVKVMGRHKPENIVIEMARENQTTQKGQKNSRERMKRIEEGIKELGSQILKEHPVENTQLQNEKLYLYYLQNGRDMYVDQELDINRLSDYDVDHIVPQSFLKDDSIDNKVLTRSDKARGKSDNVPSEEVVKKMKNYWRQLLNAKLITQRKFDNLTKAERGGLSELDKAGFIKRQLVETRQITKHVAQILDSRMNTKYDENDKLIREVKVITLKSKLVSDFRKDFQFYKVREINNYHHAHDAYLNAVVGTALIKKYPKLESEFVYGDYKVYDVRKMIAKSEQEIGKATAKYFFYSNIMNFFKTEITLANGEIRKRPLIETNGETGEIVWDKGRDFATVRKVLSMPQVNIVKKTEVQTGGFSKESILPKRNSDKLIARKKDWDPKKYGGFDSPTVAYSVLVVAKVEKGKSKKLKSVKELLGITIMERSSFEKNPIDFLEAKGYKEVKKDLIIKLPKYSLFELENGRKRMLASAGELQKGNELALPSKYVNFLYLASHYEKLKGSPEDNEQKQLFVEQHKHYLDEIIEQISEFSKRVILADANLDKVLSAYNKHRDKPIREQAENIIHLFTLTNLGAPAAFKYFDTTIDRKRYTSTKEVLDATLIHQSITGLYETRIDLSQLGGDGGEAAAKGGGGSSGGVPWLTQQPLQLTILVPLQEYQDRILNKTALPEEQKQQLKALFTKYDNLWQHWENQVGHRKIRPHNIATGDYPPRPQKQYPINPKAKPSIQIVIDDLLKQGVLTPQNSTMNTPVYPVPKPDGRWRMVLDYREVNKTIPLTAAQNQHSAGILATIVRQKYKTTLDLANGFWAHPITPDSYWLTAFTWQGKQYCWTRLPQGFLNSPALFNADAVDLLKEVPNVQVYVDDIYLSHDNPHEHIQQLEKVFQILLQAGYVVSLKKSEIGQRTVEFLGFNITKEGRGLTDTFKTKLLNVTPPKDLKQLQSILGKLNFARNFIPNFAELVQTLYNLIASSPGKYIEWTEDNTKQLNKVIEALNTASNLEERLPDQRLVIKVNTSPSAGYVRYYNESGKKPIMYLNYVFSKAELKFSMLEKLLTTMHKALIKAMDLAMGQEILVYSPIVSMTKIQKTPLPERKALPIRWITWMTYLEDPRIQFHYDKTLPELKHIPDVYTSSIPPLKHPSQYEGVFCTDGSAIKSPDPTKSNNAGMGIVHAIYNPEYKILNQWSIPLGHHTAQMAEIAAVEFACKKALKVPGPVLVITDSFYVAESANKELPYWKSNGFVNNKKEPLKHISKWKSIAECLSIKPDITIQHEKGHQPINTSIHTEGNALADKLATQGSYVVNAGKRTADGSEFEKRTADGSEFESPKKKAKVE

SEQ ID NO: 7335 - protein, 2094 aa, synthetic construct; identical to SEQ ID NO: 4531

SEQ ID NO: 7336 - protein, 2098 aa, synthetic construct
MPAAKRVKLDGGDKKYSIGLDIGTNSVGWAVITDEYKVPSKKFKVLGNTDRHSIKKNLIGALLFDSGETAEATRLKRTARRRYTRRKNRICYLQEIFSNEMAKVDDSFFHRLEESFLVEEDKKHERHPIFGNIVDEVAYHEKYPTIYHLRKKLVDSTDKADLRLIYLALAHMIKFRGHFLIEGDLNPDNSDVDKLFIQLVQTYNQLFEENPINASGVDAKAILSARLSKSRRLENLIAQLPGEKKNGLFGNLIALSLGLTPNFKSNFDLAEDAKLQLSKDTYDDDLDNLLAQIGDQYADLFLAAKNLSDAILLSDILRVNTEITKAPLSASMIKRYDEHHQDLTLLKALVRQQLPEKYKEIFFDQSKNGYAGYIDGGASQEEFYKFIKPILEKMDGTEELLVKLNREDLLRKQRTFDNGSIPHQIHLGELHAILRRQEDFYPFLKDNREKIEKILTFRIPYYVGPLARGNSRFAWMTRKSEETITPWNFEEVVDKGASAQSFIERMTNFDKNLPNEKVLPKHSLLYEYFTVYNELTKVKYVTEGMRKPAFLSGEQKKAIVDLLFKTNRKVTVKQLKEDYFKKIECFDSVEISGVEDRFNASLGTYHDLLKIIKDKDFLDNEENEDILEDIVLTLTLFEDREMIEERLKTYAHLFDDKVMKQLKRRRYTGWGRLSRKLINGIRDKQSGKTILDFLKSDGFANRNFMQLIHDDSLTFKEDIQKAQVSGQGDSLHEHIANLAGSPAIKKGILQTVKVVDELVKVMGRHKPENIVIEMARENQTTQKGQKNSRERMKRIEEGIKELGSQILKEHPVENTQLQNEKLYLYYLQNGRDMYVDQELDINRLSDYDVDHIVPQSFLKDDSIDNKVLTRSDKARGKSDNVPSEEVVKKMKNYWRQLLNAKLITQRKFDNLTKAERGGLSELDKAGFIKRQLVETRQITKHVAQILDSRMNTKYDENDKLIREVKVITLKSKLVSDFRKDFQFYKVREINNYHHAHDAYLNAVVGTALIKKYPKLESEFVYGDYKVYDVRKMIAKSEQEIGKATAKYFFYSNIMNFFKTEITLANGEIRKRPLIETNGETGEIVWDKGRDFATVRKVLSMPQVNIVKKTEVQTGGFSKESILPKRNSDKLIARKKDWDPKKYGGFDSPTVAYSVLVVAKVEKGKSKKLKSVKELLGITIMERSSFEKNPIDFLEAKGYKEVKKDLIIKLPKYSLFELENGRKRMLASAGELQKGNELALPSKYVNFLYLASHYEKLKGSPEDNEQKQLFVEQHKHYLDEIIEQISEFSKRVILADANLDKVLSAYNKHRDKPIREQAENIIHLFTLTNLGAPAAFKYFDTTIDRKRYTSTKEVLDATLIHQSITGLYETRIDLSQLGGDGGEAAAKGSSGGGGGTAPLEEEYRLFLEAPIQNVTLLEQWKREIPKVWAEINPPGLASTQAPIHVQLLSTALPVRVRQYPITLEAKRSLRETIRKFRAAGILRPVHSPWNTPLLPVRKSGTSEYRMVQDLREVNKRVETIHPTVPNPYTLLSLLPPDRIWYSVLDLKDAFFCIPLAPESQLIFAFEWADAEEGESGQLTWTRLPQGFKNSPTLFNEALNRDLQGFRLDHPSVSLLQYVDDLLIAADTQAACLSATRDLLMTLAELGYRVSGKKAQLCQEEVTYLGFKIHKGSRSLSNSRTQAILQIPVPKTKRQVREFLGTIGYCRLWIPGFAELAQPLYAATRPGNDPLVWGEKEEEAFQSLKLALTQPPALALPSLDKPFQLFVEETSGAAKGVLTQALGPWKRPVAYLSKRLDPVAAGWPRCLRAIAAAALLTREASKLTFGQDIEITSSHNLESLLRSPPDKWLTNARITQYQVLLLDPPRVRFKQTAALNPATLLPETDDTLPIHHCLDTLDSLTSTRPDLTDQPLAQAEATLFTDGSSYIRDGKRYAGAAVVTLDSVIWAEPLPIGTSAQKAELIALTKALEWSKDKSVNIYTDSRYAFATLHVHGMIYRERGWLTAGGKAIKNAPEILALLTAVWLPKRVAVMHCKGHQKDDAPTSTGNRRADEVAREVAIRPLSTQATISAGKRTADGSEFEKRTADGSEFESPKKKAKVE

SEQ ID NO: 7337 - protein, 2173 aa, synthetic construct
MPAAKRVKLDGGDKKYSIGLDIGTNSVGWAVITDEYKVPSKKFKVLGNTDRHSIKKNLIGALLFDSGETAEATRLKRTARRRYTRRKNRICYLQEIFSNEMAKVDDSFFHRLEESFLVEEDKKHERHPIFGNIVDEVAYHEKYPTIYHLRKKLVDSTDKADLRLIYLALAHMIKFRGHFLIEGDLNPDNSDVDKLFIQLVQTYNQLFEENPINASGVDAKAILSARLSKSRRLENLIAQLPGEKKNGLFGNLIALSLGLTPNFKSNFDLAEDAKLQLSKDTYDDDLDNLLAQIGDQYADLFLAAKNLSDAILLSDILRVNTEITKAPLSASMIKRYDEHHQDLTLLKALVRQQLPEKYKEIFFDQSKNGYAGYIDGGASQEEFYKFIKPILEKMDGTEELLVKLNREDLLRKQRTFDNGSIPHQIHLGELHAILRRQEDFYPFLKDNREKIEKILTFRIPYYVGPLARGNSRFAWMTRKSEETITPWNFEEVVDKGASAQSFIERMTNFDKNLPNEKVLPKHSLLYEYFTVYNELTKVKYVTEGMRKPAFLSGEQKKAIVDLLFKTNRKVTVKQLKEDYFKKIECFDSVEISGVEDRFNASLGTYHDLLKIIKDKDFLDNEENEDILEDIVLTLTLFEDREMIEERLKTYAHLFDDKVMKQLKRRRYTGWGRLSRKLINGIRDKQSGKTILDFLKSDGFANRNFMQLIHDDSLTFKEDIQKAQVSGQGDSLHEHIANLAGSPAIKKGILQTVKVVDELVKVMGRHKPENIVIEMARENQTTQKGQKNSRERMKRIEEGIKELGSQILKEHPVENTQLQNEKLYLYYLQNGRDMYVDQELDINRLSDYDVDHIVPQSFLKDDSIDNKVLTRSDKARGKSDNVPSEEVVKKMKNYWRQLLNAKLITQRKFDNLTKAERGGLSELDKAGFIKRQLVETRQITKHVAQILDSRMNTKYDENDKLIREVKVITLKSKLVSDFRKDFQFYKVREINNYHHAHDAYLNAVVGTALIKKYPKLESEFVYGDYKVYDVRKMIAKSEQEIGKATAKYFFYSNIMNFFKTEITLANGEIRKRPLIETNGETGEIVWDKGRDFATVRKVLSMPQVNIVKKTEVQTGGFSKESILPKRNSDKLIARKKDWDPKKYGGFDSPTVAYSVLVVAKVEKGKSKKLKSVKELLGITIMERSSFEKNPIDFLEAKGYKEVKKDLIIKLPKYSLFELENGRKRMLASAGELQKGNELALPSKYVNFLYLASHYEKLKGSPEDNEQKQLFVEQHKHYLDEIIEQISEFSKRVILADANLDKVLSAYNKHRDKPIREQAENIIHLFTLTNLGAPAAFKYFDTTIDRKRYTSTKEVLDATLIHQSITGLYETRIDLSQLGGDGGEAAAKGSSGGGGGMDLLKPLTVERKGVKIKGYWNSQADITCVPKDLLQGEEPVRQQNVTTIHGTQEGDVYYVNLKIDGRRINTEVIGTTLDYAIITPGDVPWILKKPLELTIKLDLEEQQGTLLNNSILSKKGKEELKQLFEKYSALWQSWENQVGHRRIRPHKIATGTVKPTPQKQYHINPKAKPDIQIVINDLLKQGVLIQKESTMNTPVYPVPKPNGRWRMVLDYRAVNKVTPLIAVQNQHSYGILGSLFKGRYKTTIDLSNGFWAHPIVPEDYWITAFTWQGKQYCWTVLPQGFLNSPGLFTGDVVDLLQGIPNVEVYVDDVYISHDSEKEHLEYLDILFNRLKEAGYIISLKKSNIANSIVDFLGFQITNEGRGLTDTFKEKLENITAPTTLKQLQSILGLLNFARNFIPDFTELIAPLYALIPKSTKNYVPWQIEHSTTLETLITKLNGAEYLQGRKGDKTLIMKVNASYTTGYIRYYNEGEKKPISYVSIVFSKTELKFTELEKLLTTVHKGLLKALDLSMGQNIHVYSPIVSMQNIQKTPQTAKKALASRWLSWLSYLEDPRIRFFYDPQMPALKDLPAVDTGKDNKKHPSNFQHIFYTDGSAITSPTKEGHLNAGMGIVYFINKDGNLQKQQEWSISLGNHTAQFAEIAAFEFALKKCLPLGGNILVVTDSNYVAKAYNEELDVWASNGFVNNRKKPLKHISKWKSVADLKRLRPDVVVTHEPGHQKLDSSPHAYGNNLADQLATQASFKVHAGKRTADGSEFEKRTADGSEFESPKKKAKVE

SEQ ID NO: 7338 - protein, 2127 aa, synthetic construct
MPAAKRVKLDGGDKKYSIGLDIGTNSVGWAVITDEYKVPSKKFKVLGNTDRHSIKKNLIGALLFDSGETAEATRLKRTARRRYTRRKNRICYLQEIFSNEMAKVDDSFFHRLEESFLVEEDKKHERHPIFGNIVDEVAYHEKYPTIYHLRKKLVDSTDKADLRLIYLALAHMIKFRGHFLIEGDLNPDNSDVDKLFIQLVQTYNQLFEENPINASGVDAKAILSARLSKSRRLENLIAQLPGEKKNGLFGNLIALSLGLTPNFKSNFDLAEDAKLQLSKDTYDDDLDNLLAQIGDQYADLFLAAKNLSDAILLSDILRVNTEITKAPLSASMIKRYDEHHQDLTLLKALVRQQLPEKYKEIFFDQSKNGYAGYIDGGASQEEFYKFIKPILEKMDGTEELLVKLNREDLLRKQRTFDNGSIPHQIHLGELHAILRRQEDFYPFLKDNREKIEKILTFRIPYYVGPLARGNSRFAWMTRKSEETITPWNFEEVVDKGASAQSFIERMTNFDKNLPNEKVLPKHSLLYEYFTVYNELTKVKYVTEGMRKPAFLSGEQKKAIVDLLFKTNRKVTVKQLKEDYFKKIECFDSVEISGVEDRFNASLGTYHDLLKIIKDKDFLDNEENEDILEDIVLTLTLFEDREMIEERLKTYAHLFDDKVMKQLKRRRYTGWGRLSRKLINGIRDKQSGKTILDFLKSDGFANRNFMQLIHDDSLTFKEDIQKAQVSGQGDSLHEHIANLAGSPAIKKGILQTVKVVDELVKVMGRHKPENIVIEMARENQTTQKGQKNSRERMKRIEEGIKELGSQILKEHPVENTQLQNEKLYLYYLQNGRDMYVDQELDINRLSDYDVDHIVPQSFLKDDSIDNKVLTRSDKARGKSDNVPSEEVVKKMKNYWRQLLNAKLITQRKFDNLTKAERGGLSELDKAGFIKRQLVETRQITKHVAQILDSRMNTKYDENDKLIREVKVITLKSKLVSDFRKDFQFYKVREINNYHHAHDAYLNAVVGTALIKKYPKLESEFVYGDYKVYDVRKMIAKSEQEIGKATAKYFFYSNIMNFFKTEITLANGEIRKRPLIETNGETGEIVWDKGRDFATVRKVLSMPQVNIVKKTEVQTGGFSKESILPKRNSDKLIARKKDWDPKKYGGFDSPTVAYSVLVVAKVEKGKSKKLKSVKELLGITIMERSSFEKNPIDFLEAKGYKEVKKDLIIKLPKYSLFELENGRKRMLASAGELQKGNELALPSKYVNFLYLASHYEKLKGSPEDNEQKQLFVEQHKHYLDEIIEQISEFSKRVILADANLDKVLSAYNKHRDKPIREQAENIIHLFTLTNLGAPAAFKYFDTTIDRKRYTSTKEVLDATLIHQSITGLYETRIDLSQLGGDGGEAAAKGSSGGGGGLLGRDLLTKLKAQIQFSTEGPQVTWEDRPAMCLVLNLEEEYRLHEKPVPPSIDPSWLQLFPMVWAEKAGMGLANQVPPVVVELKSDASPVAVRQYPMSKEAREGIRPHIQRFLDLGILVPCQSPWNTPLLPVKKPGTNDYRPVQDLREVNKRVQDIHPTVPNPYNLLSSLPPSHTWYSVLDLKDAFFCLKLHPNSQPLFAFEWRDPEKGNTGQLTWTRLPQGFKNSPTLFNEALHRDLASFRALNPQVVMLQYVDDLLVAAPTYRDCKEGTRRLLQELSKLGYRVSAKKAQLCREEVTYLGYLLKGGKRWLTPARKATVMKIPTPTTPRQVREFLGTAGFCRLWIPGFASLAAPLYPLTRPKVPFTWTEAHQEAFGRIKEALLSAPALALPDLTKPFALYVDEKEGVARGVLTQTLGPWRRPVAYLSKKLDPVASGWPTCLKAIAAVALLLKDADKLTLGQNVLVIAPHNLESIVRQPPDRWMTNARMTHYQSLLLNERVSFAPPAILNPATLLPVESDDTPIHICSEILAEETGTRPDLRDQPLPGVPAWYTDGSSFIMDGRRQAGAAIVDNKRTVWASNLPEGTSAQKAELIALTQALRLAEGKSINIYTDSRYAFATAHVHGAIYKQRGWLTSAGKDIKNKEEILALLEAIHLPKRVAIIHCPGHQRGTDPVATGNRKADEAAKQAAQSTRILTETTKNAGKRTADGSEFEKRTADGSEFESPKKKAKVE

SEQ ID NO: 7339 - protein, 2218 aa, synthetic construct
MPAAKRVKLDGGDKKYSIGLDIGTNSVGWAVITDEYKVPSKKFKVLGNTDRHSIKKNLIGALLFDSGETAEATRLKRTARRRYTRRKNRICYLQEIFSNEMAKVDDSFFHRLEESFLVEEDKKHERHPIFGNIVDEVAYHEKYPTIYHLRKKLVDSTDKADLRLIYLALAHMIKFRGHFLIEGDLNPDNSDVDKLFIQLVQTYNQLFEENPINASGVDAKAILSARLSKSRRLENLIAQLPGEKKNGLFGNLIALSLGLTPNFKSNFDLAEDAKLQLSKDTYDDDLDNLLAQIGDQYADLFLAAKNLSDAILLSDILRVNTEITKAPLSASMIKRYDEHHQDLTLLKALVRQQLPEKYKEIFFDQSKNGYAGYIDGGASQEEFYKFIKPILEKMDGTEELLVKLNREDLLRKQRTFDNGSIPHQIHLGELHAILRRQEDFYPFLKDNREKIEKILTFRIPYYVGPLARGNSRFAWMTRKSEETITPWNFEEVVDKGASAQSFIERMTNFDKNLPNEKVLPKHSLLYEYFTVYNELTKVKYVTEGMRKPAFLSGEQKKAIVDLLFKTNRKVTVKQLKEDYFKKIECFDSVEISGVEDRFNASLGTYHDLLKIIKDKDFLDNEENEDILEDIVLTLTLFEDREMIEERLKTYAHLFDDKVMKQLKRRRYTGWGRLSRKLINGIRDKQSGKTILDFLKSDGFANRNFMQLIHDDSLTFKEDIQKAQVSGQGDSLHEHIANLAGSPAIKKGILQTVKVVDELVKVMGRHKPENIVIEMARENQTTQKGQKNSRERMKRIEEGIKELGSQILKEHPVENTQLQNEKLYLYYLQNGRDMYVDQELDINRLSDYDVDHIVPQSFLKDDSIDNKVLTRSDKARGKSDNVPSEEVVKKMKNYWRQLLNAKLITQRKFDNLTKAERGGLSELDKAGFIKRQLVETRQITKHVAQILDSRMNTKYDENDKLIREVKVITLKSKLVSDFRKDFQFYKVREINNYHHAHDAYLNAVVGTALIKKYPKLESEFVYGDYKVYDVRKMIAKSEQEIGKATAKYFFYSNIMNFFKTEITLANGEIRKRPLIETNGETGEIVWDKGRDFATVRKVLSMPQVNIVKKTEVQTGGFSKESILPKRNSDKLIARKKDWDPKKYGGFDSPTVAYSVLVVAKVEKGKSKKLKSVKELLGITIMERSSFEKNPIDFLEAKGYKEVKKDLIIKLPKYSLFELENGRKRMLASAGELQKGNELALPSKYVNFLYLASHYEKLKGSPEDNEQKQLFVEQHKHYLDEIIEQISEFSKRVILADANLDKVLSAYNKHRDKPIREQAENIIHLFTLTNLGAPAAFKYFDTTIDRKRYTSTKEVLDATLIHQSITGLYETRIDLSQLGGDGGEAAAKGSSGGGGGTLGDQGSRGSDPLPEPRVTLTVEGIPTEFLVNTGAEHSVLTKPMGKMGSKRTVVAGATGSKVYPWTTKRLLKIGQKQVTHSFLVIPECPAPLLGRDLLTKLKAQIQFSTEGPQVTWEDRPAMCLVLNLEEEYRLHEKPVPPSIDPSWLQLFPMVWAEKAGMGLANQVPPVVVELKSDASPVAVRQYPMSKEAREGIRPHIQRFLDLGILVPCQSPWNTPLLPVKKPGTNDYRPVQDLREVNKRVQDIHPTVPNPYNLLSSLPPSHTWYSVLDLKDAFFCLKLHPNSQPLFAFEWRDPEKGNTGQLTWTRLPQGFKNSPTLFNEALHRDLASFRALNPQVVMLQYVDDLLVAAPTYRDCKEGTRRLLQELSKLGYRVSAKKAQLCREEVTYLGYLLKGGKRWLTPARKATVMKIPTPTTPRQVREFLGKAGFCRLFIPGFASLAAPLYPLTRPKVPFTWTEAHQEAFGRIKEALLSAPALALPDLTKPFALYVDEKEGVARGVLTQTLGPWRRPVAYLSKKLDPVASGWPTCLKAIAAVALLLKDADKLTLGQNVLVIAPHNLESIVRQPPDRWMTNARMTHYQSLLLNERVSFAPPAILNPATLLPVESDDTPIHICSEILAEETGTRPDLRDQPLPGVPAWYTDGSSFIMDGRRQAGAAIVDNKRTVWASNLPEGTSAQKAELIALTQALRLAEGKSINIYTDSRYAFATAHVHGAIYKQRGWLTSAGKDIKNKEEILALLEAIHLPKRVAIIHCPGHQRGTDPVATGNRKADEAAKQAAQSTRILTETTKNAGKRTADGSEFEKRTADGSEFESPKKKAKVE

SEQ ID NO: 7340 - protein, 2096 aa, synthetic construct
MPAAKRVKLDGGDKKYSIGLDIGTNSVGWAVITDEYKVPSKKFKVLGNTDRHSIKKNLIGALLFDSGETAEATRLKRTARRRYTRRKNRICYLQEIFSNEMAKVDDSFFHRLEESFLVEEDKKHERHPIFGNIVDEVAYHEKYPTIYHLRKKLVDSTDKADLRLIYLALAHMIKFRGHFLIEGDLNPDNSDVDKLFIQLVQTYNQLFEENPINASGVDAKAILSARLSKSRRLENLIAQLPGEKKNGLFGNLIALSLGLTPNFKSNFDLAEDAKLQLSKDTYDDDLDNLLAQIGDQYADLFLAAKNLSDAILLSDILRVNTEITKAPLSASMIKRYDEHHQDLTLLKALVRQQLPEKYKEIFFDQSKNGYAGYIDGGASQEEFYKFIKPILEKMDGTEELLVKLNREDLLRKQRTFDNGSIPHQIHLGELHAILRRQEDFYPFLKDNREKIEKILTFRIPYYVGPLARGNSRFAWMTRKSEETITPWNFEEVVDKGASAQSFIERMTNFDKNLPNEKVLPKHSLLYEYFTVYNELTKVKYVTEGMRKPAFLSGEQKKAIVDLLFKTNRKVTVKQLKEDYFKKIECFDSVEISGVEDRFNASLGTYHDLLKIIKDKDFLDNEENEDILEDIVLTLTLFEDREMIEERLKTYAHLFDDKVMKQLKRRRYTGWGRLSRKLINGIRDKQSGKTILDFLKSDGFANRNFMQLIHDDSLTFKEDIQKAQVSGQGDSLHEHIANLAGSPAIKKGILQTVKVVDELVKVMGRHKPENIVIEMARENQTTQKGQKNSRERMKRIEEGIKELGSQILKEHPVENTQLQNEKLYLYYLQNGRDMYVDQELDINRLSDYDVDHIVPQSFLKDDSIDNKVLTRSDKARGKSDNVPSEEVVKKMKNYWRQLLNAKLITQRKFDNLTKAERGGLSELDKAGFIKRQLVETRQITKHVAQILDSRMNTKYDENDKLIREVKVITLKSKLVSDFRKDFQFYKVREINNYHHAHDAYLNAVVGTALIKKYPKLESEFVYGDYKVYDVRKMIAKSEQEIGKATAKYFFYSNIMNFFKTEITLANGEIRKRPLIETNGETGEIVWDKGRDFATVRKVLSMPQVNIVKKTEVQTGGFSKESILPKRNSDKLIARKKDWDPKKYGGFDSPTVAYSVLVVAKVEKGKSKKLKSVKELLGITIMERSSFEKNPIDFLEAKGYKEVKKDLIIKLPKYSLFELENGRKRMLASAGELQKGNELALPSKYVNFLYLASHYEKLKGSPEDNEQKQLFVEQHKHYLDEIIEQISEFSKRVILADANLDKVLSAYNKHRDKPIREQAENIIHLFTLTNLGAPAAFKYFDTTIDRKRYTSTKEVLDATLIHQSITGLYETRIDLSQLGGDGGEAAAKGSSGGGGGTLGIEDEYRLHETSTEPDVSLGSTWLSDFPQAWAETGGMGLAVRQAPLIIPLKATSTPVSIQQYPMSHEARLGIKPHIQRLLDQGILVPCQSPWNTPLLPVKKPGTNDYRPVQDLREVNKRVEDIHPTVPNPYNLLSGLPPSHQWYTVLDLKDAFFCLRLHPTSQPLFAFEWRDPGMGISGQLTWTRLPQGFKNSPTLFNEALHRDLADFRIQHPDLILLQYVDDILLAATSELDCQQGTRALLQTLGDLGYRASAKKAQICQKQVKYLGYLLREGQRWLTEARKETVMGQPVPKTPRQLREFLGTAGFCRLWIPGFAEMAAPLYPLTKPGTLFSWGPDQQKAYQEIKQALLTAPALGLPDLTKPFELFVDEKQGYAKGVLTQKLGPWRRPVAYLSKKLDPVAAGWPPCLRMVAAIAVLTKDAGKLTMGQPLVILAPHAVEALVKQPPDRWLSNARMTHYQAMLLDTDRVQFGPVVALNPATLLPLPEEGAPHDCLEILAETHGTRPDLTDQPIPDADHTWYTDGSSFLQEGQRKAGAAVTTETEVIWAGALPAGTSAQRAELIALTQALKMAEGKRLNVYTDSRYAFATAHIHGEIYRRRGWLTSEGREIKNKSEILALLKALFLPKRLSIIHCLGHQKGDSAEARGNRLADQAAREAAIKTPPDTSTLLAGKRTADGSEFEKRTADGSEFESPKKKAKVE

SEQ ID NO: 7341 - protein, 2096 aa, synthetic construct
MPAAKRVKLDGGDKKYSIGLDIGTNSVGWAVITDEYKVPSKKFKVLGNTDRHSIKKNLIGALLFDSGETAEATRLKRTARRRYTRRKNRICYLQEIFSNEMAKVDDSFFHRLEESFLVEEDKKHERHPIFGNIVDEVAYHEKYPTIYHLRKKLVDSTDKADLRLIYLALAHMIKFRGHFLIEGDLNPDNSDVDKLFIQLVQTYNQLFEENPINASGVDAKAILSARLSKSRRLENLIAQLPGEKKNGLFGNLIALSLGLTPNFKSNFDLAEDAKLQLSKDTYDDDLDNLLAQIGDQYADLFLAAKNLSDAILLSDILRVNTEITKAPLSASMIKRYDEHHQDLTLLKALVRQQLPEKYKEIFFDQSKNGYAGYIDGGASQEEFYKFIKPILEKMDGTEELLVKLNREDLLRKQRTFDNGSIPHQIHLGELHAILRRQEDFYPFLKDNREKIEKILTFRIPYYVGPLARGNSRFAWMTRKSEETITPWNFEEVVDKGASAQSFIERMTNFDKNLPNEKVLPKHSLLYEYFTVYNELTKVKYVTEGMRKPAFLSGEQKKAIVDLLFKTNRKVTVKQLKEDYFKKIECFDSVEISGVEDRFNASLGTYHDLLKIIKDKDFLDNEENEDILEDIVLTLTLFEDREMIEERLKTYAHLFDDKVMKQLKRRRYTGWGRLSRKLINGIRDKQSGKTILDFLKSDGFANRNFMQLIHDDSLTFKEDIQKAQVSGQGDSLHEHIANLAGSPAIKKGILQTVKVVDELVKVMGRHKPENIVIEMARENQTTQKGQKNSRERMKRIEEGIKELGSQILKEHPVENTQLQNEKLYLYYLQNGRDMYVDQELDINRLSDYDVDHIVPQSFLKDDSIDNKVLTRSDKARGKSDNVPSEEVVKKMKNYWRQLLNAKLITQRKFDNLTKAERGGLSELDKAGFIKRQLVETRQITKHVAQILDSRMNTKYDENDKLIREVKVITLKSKLVSDFRKDFQFYKVREINNYHHAHDAYLNAVVGTALIKKYPKLESEFVYGDYKVYDVRKMIAKSEQEIGKATAKYFFYSNIMNFFKTEITLANGEIRKRPLIETNGETGEIVWDKGRDFATVRKVLSMPQVNIVKKTEVQTGGFSKESILPKRNSDKLIARKKDWDPKKYGGFDSPTVAYSVLVVAKVEKGKSKKLKSVKELLGITIMERSSFEKNPIDFLEAKGYKEVKKDLIIKLPKYSLFELENGRKRMLASAGELQKGNELALPSKYVNFLYLASHYEKLKGSPEDNEQKQLFVEQHKHYLDEIIEQISEFSKRVILADANLDKVLSAYNKHRDKPIREQAENIIHLFTLTNLGAPAAFKYFDTTIDRKRYTSTKEVLDATLIHQSITGLYETRIDLSQLGGDGGEAAAKGSSGGGGGTLGIEDEYRLHETSTEPDVSLGSTWLSDFPQAWAETGGMGLAVRQAPLIIPLKATSTPVSIQQYPMSHEARLGIKPHIQRLLDQGILVPCQSPWNTPLLPVKKPGTNDYRPVQDLREVNKRVEDIHPTVPNPYNLLSGLPPSHQWYTVLDLKDAFFCLRLHPTSQPLFAFEWRDPGMGISGQLTWTRLPQGFKNSPTLFDEALHRDLADFRIQHPDLILLQYVDDILLAATSELDCQQGTRALLQTLGDLGYRASAKKAQICQKQVKYLGYLLREGQRWLTEARKETVMGQPVPKTPRQLREFLGTAGFCRLWIPGFAEMAAPLYPLTKTGTLFSWGPDQQKAYQEIKQALLTAPALGLPDLTKPFELFVDEKQGYAKGVLTQKLGPWRRPVAYLSKKLDPVAAGWPPCLRMVAAIAVLTKDAGKLTMGQPLVILAPHAVEALVKQPPDRWLSNARMTHYQAMLLDTDRVQFGPVVALNPATLLPLPEEGAPHDCLEILAETHGTRPDLTDQPIPDADHTWYTDGSSFLQEGQRKAGAAVTTETEVIWAGALPAGTSAQRAELIALTQALKMAEGKRLNVYTDSRYAFATAHIHGEIYRRRGLLTSEGREIKNKSEILALLKALFLPKRLSIIHCLGHQKGDSAEARGNRLADQAAREAAIKTPPDTSTLLAGKRTADGSEFEKRTADGSEFESPKKKAKVE

SEQ ID NO: 7342 - protein, 2096 aa, synthetic construct
MPAAKRVKLDGGDKKYSIGLDIGTNSVGWAVITDEYKVPSKKFKVLGNTDRHSIKKNLIGALLFDSGETAEATRLKRTARRRYTRRKNRICYLQEIFSNEMAKVDDSFFHRLEESFLVEEDKKHERHPIFGNIVDEVAYHEKYPTIYHLRKKLVDSTDKADLRLIYLALAHMIKFRGHFLIEGDLNPDNSDVDKLFIQLVQTYNQLFEENPINASGVDAKAILSARLSKSRRLENLIAQLPGEKKNGLFGNLIALSLGLTPNFKSNFDLAEDAKLQLSKDTYDDDLDNLLAQIGDQYADLFLAAKNLSDAILLSDILRVNTEITKAPLSASMIKRYDEHHQDLTLLKALVRQQLPEKYKEIFFDQSKNGYAGYIDGGASQEEFYKFIKPILEKMDGTEELLVKLNREDLLRKQRTFDNGSIPHQIHLGELHAILRRQEDFYPFLKDNREKIEKILTFRIPYYVGPLARGNSRFAWMTRKSEETITPWNFEEVVDKGASAQSFIERMTNFDKNLPNEKVLPKHSLLYEYFTVYNELTKVKYVTEGMRKPAFLSGEQKKAIVDLLFKTNRKVTVKQLKEDYFKKIECFDSVEISGVEDRFNASLGTYHDLLKIIKDKDFLDNEENEDILEDIVLTLTLFEDREMIEERLKTYAHLFDDKVMKQLKRRRYTGWGRLSRKLINGIRDKQSGKTILDFLKSDGFANRNFMQLIHDDSLTFKEDIQKAQVSGQGDSLHEHIANLAGSPAIKKGILQTVKVVDELVKVMGRHKPENIVIEMARENQTTQKGQKNSRERMKRIEEGIKELGSQILKEHPVENTQLQNEKLYLYYLQNGRDMYVDQELDINRLSDYDVDHIVPQSFLKDDSIDNKVLTRSDKARGKSDNVPSEEVVKKMKNYWRQLLNAKLITQRKFDNLTKAERGGLSELDKAGFIKRQLVETRQITKHVAQILDSRMNTKYDENDKLIREVKVITLKSKLVSDFRKDFQFYKVREINNYHHAHDAYLNAVVGTALIKKYPKLESEFVYGDYKVYDVRKMIAKSEQEIGKATAKYFFYSNIMNFFKTEITLANGEIRKRPLIETNGETGEIVWDKGRDFATVRKVLSMPQVNIVKKTEVQTGGFSKESILPKRNSDKLIARKKDWDPKKYGGFDSPTVAYSVLVVAKVEKGKSKKLKSVKELLGITIMERSSFEKNPIDFLEAKGYKEVKKDLIIKLPKYSLFELENGRKRMLASAGELQKGNELALPSKYVNFLYLASHYEKLKGSPEDNEQKQLFVEQHKHYLDEIIEQISEFSKRVILADANLDKVLSAYNKHRDKPIREQAENIIHLFTLTNLGAPAAFKYFDTTIDRKRYTSTKEVLDATLIHQSITGLYETRIDLSQLGGDGGEAAAKGSSGGGGGTLNIEDEYRLHETSKEPDVSLGSTWLSDFPQAWAETGGMGLAVRQAPLIIPLKATSTPVSIKQYPMSQEARLGIKPHIQRLLDQGILVPCQSPWNTPLLPVKKPGTNDYRPVQDLREVNKRVEDIHPTVPNPYNLLSGLPPSHQWYTVLDLKDAFFCLRLHPTSQPLFAFEWRDPEMGISGQLTWTRLPQGFKNSPTLFNEALHRDLAGFRIQHPDLILLQYVDDLLLAATSELDCQQGTRALLQTLGDLGYRASAKKAQICQKQVKYLGYLLKEGQRWLTEARKETVMGQPIPKTPRQLREFLGTAGFCRLWIPGFAEMAAPLYPLTKPGTLFNWGPDQQKAFQEIKQALLTAPALGLPDLTKPFELFVDEKQGYAKGVLTQKLGPWRRPVAYLSKKLDPVAAGWPPCLRMVAAIAVLTKDAGKLTMGQPLVILAPHAVEALVKQPPDRWLSNARMTHYQALLLDTDRVQFGPVVALNPATLLPLPEEGLQHDCLDILAEAHGTRSDLMDQPLPDADHTWYTDGSSFLQEGQRKAGAAVTTETEVIWARALPAGTSAQRAELIALTQALKMAEGKKLNVYTDSRYAFATAHIHGEIYRRRGWLTSEGKEIKNKDEILALLKALFLPKRLSIIHCPGHQKGNSAEARGNRMADQAAREVATRETPETSTLLAGKRTADGSEFEKRTADGSEFESPKKKAKVE

SEQ ID NO: 7343 - protein, 2096 aa, synthetic construct
MPAAKRVKLDGGDKKYSIGLDIGTNSVGWAVITDEYKVPSKKFKVLGNTDRHSIKKNLIGALLFDSGETAEATRLKRTARRRYTRRKNRICYLQEIFSNEMAKVDDSFFHRLEESFLVEEDKKHERHPIFGNIVDEVAYHEKYPTIYHLRKKLVDSTDKADLRLIYLALAHMIKFRGHFLIEGDLNPDNSDVDKLFIQLVQTYNQLFEENPINASGVDAKAILSARLSKSRRLENLIAQLPGEKKNGLFGNLIALSLGLTPNFKSNFDLAEDAKLQLSKDTYDDDLDNLLAQIGDQYADLFLAAKNLSDAILLSDILRVNTEITKAPLSASMIKRYDEHHQDLTLLKALVRQQLPEKYKEIFFDQSKNGYAGYIDGGASQEEFYKFIKPILEKMDGTEELLVKLNREDLLRKQRTFDNGSIPHQIHLGELHAILRRQEDFYPFLKDNREKIEKILTFRIPYYVGPLARGNSRFAWMTRKSEETITPWNFEEVVDKGASAQSFIERMTNFDKNLPNEKVLPKHSLLYEYFTVYNELTKVKYVTEGMRKPAFLSGEQKKAIVDLLFKTNRKVTVKQLKEDYFKKIECFDSVEISGVEDRFNASLGTYHDLLKIIKDKDFLDNEENEDILEDIVLTLTLFEDREMIEERLKTYAHLFDDKVMKQLKRRRYTGWGRLSRKLINGIRDKQSGKTILDFLKSDGFANRNFMQLIHDDSLTFKEDIQKAQVSGQGDSLHEHIANLAGSPAIKKGILQTVKVVDELVKVMGRHKPENIVIEMARENQTTQKGQKNSRERMKRIEEGIKELGSQILKEHPVENTQLQNEKLYLYYLQNGRDMYVDQELDINRLSDYDVDHIVPQSFLKDDSIDNKVLTRSDKARGKSDNVPSEEVVKKMKNYWRQLLNAKLITQRKFDNLTKAERGGLSELDKAGFIKRQLVETRQITKHVAQILDSRMNTKYDENDKLIREVKVITLKSKLVSDFRKDFQFYKVREINNYHHAHDAYLNAVVGTALIKKYPKLESEFVYGDYKVYDVRKMIAKSEQEIGKATAKYFFYSNIMNFFKTEITLANGEIRKRPLIETNGETGEIVWDKGRDFATVRKVLSMPQVNIVKKTEVQTGGFSKESILPKRNSDKLIARKKDWDPKKYGGFDSPTVAYSVLVVAKVEKGKSKKLKSVKELLGITIMERSSFEKNPIDFLEAKGYKEVKKDLIIKLPKYSLFELENGRKRMLASAGELQKGNELALPSKYVNFLYLASHYEKLKGSPEDNEQKQLFVEQHKHYLDEIIEQISEFSKRVILADANLDKVLSAYNKHRDKPIREQAENIIHLFTLTNLGAPAAFKYFDTTIDRKRYTSTKEVLDATLIHQSITGLYETRIDLSQLGGDGGEAAAKGSSGGGGGTLNIEDEHRLHETSKEPDVSLGSTWLSDFPQAWAETGGMGLAVRQAPLIIPLKATSTPVSIKQYPMSQEARLGIKPHIQRLLDQGILVPCQSPWNTPLLPVKKPGTNDYRPVQDLREVNKRVEDIHPTVPNPYNLLSGLPPSHQWYTVLDLKDAFFCLRLHPTSQPLFAFEWRDPEMGISGQLTWTRLPQGFKNSPTLFNEALHRDLADFRIQHPDLILLQYVDDLLLAATSELDCQQGTRALLQTLGNLGYRASAKKAQICQKQVKYLGYLLKEGQRWLTEARKETVMGQPTPKTPRQLREFLGTAGFCRLWIPGFAEMAAPLYPLTKPGTLFNWGPDQQKAYQEIKQALLTAPALGLPDLTKPFELFVDEKQGYAKGVLTQKLGPWRRPVAYLSKKLDPVAAGWPPCLRMVAAIAVLTKDAGKLTMGQPLVILAPHAVEALVKQPPDRWLSNARMTHYQALLLDTDRVQFGPVVALNPATLLPLPEEGLQHNCLDILAEAHGTRPDLTDQPLPDADHTWYTDGSSLLQEGQRKAGAAVTTETEVIWAKALPAGTSAQRAELIALTQALKMAEGKKLNVYTDSRYAFATAHIHGEIYRRRGWLTSEGKEIKNKDEILALLKALFLPKRLSIIHCPGHQKGHSAEARGNRMADQAARKAAITETPDTSTLLAGKRTADGSEFEKRTADGSEFESPKKKAKVE

SEQ ID NO: 7344 - protein, 2116 aa, synthetic construct
MPAAKRVKLDGGDKKYSIGLDIGTNSVGWAVITDEYKVPSKKFKVLGNTDRHSIKKNLIGALLFDSGETAEATRLKRTARRRYTRRKNRICYLQEIFSNEMAKVDDSFFHRLEESFLVEEDKKHERHPIFGNIVDEVAYHEKYPTIYHLRKKLVDSTDKADLRLIYLALAHMIKFRGHFLIEGDLNPDNSDVDKLFIQLVQTYNQLFEENPINASGVDAKAILSARLSKSRRLENLIAQLPGEKKNGLFGNLIALSLGLTPNFKSNFDLAEDAKLQLSKDTYDDDLDNLLAQIGDQYADLFLAAKNLSDAILLSDILRVNTEITKAPLSASMIKRYDEHHQDLTLLKALVRQQLPEKYKEIFFDQSKNGYAGYIDGGASQEEFYKFIKPILEKMDGTEELLVKLNREDLLRKQRTFDNGSIPHQIHLGELHAILRRQEDFYPFLKDNREKIEKILTFRIPYYVGPLARGNSRFAWMTRKSEETITPWNFEEVVDKGASAQSFIERMTNFDKNLPNEKVLPKHSLLYEYFTVYNELTKVKYVTEGMRKPAFLSGEQKKAIVDLLFKTNRKVTVKQLKEDYFKKIECFDSVEISGVEDRFNASLGTYHDLLKIIKDKDFLDNEENEDILEDIVLTLTLFEDREMIEERLKTYAHLFDDKVMKQLKRRRYTGWGRLSRKLINGIRDKQSGKTILDFLKSDGFANRNFMQLIHDDSLTFKEDIQKAQVSGQGDSLHEHIANLAGSPAIKKGILQTVKVVDELVKVMGRHKPENIVIEMARENQTTQKGQKNSRERMKRIEEGIKELGSQILKEHPVENTQLQNEKLYLYYLQNGRDMYVDQELDINRLSDYDVDHIVPQSFLKDDSIDNKVLTRSDKARGKSDNVPSEEVVKKMKNYWRQLLNAKLITQRKFDNLTKAERGGLSELDKAGFIKRQLVETRQITKHVAQILDSRMNTKYDENDKLIREVKVITLKSKLVSDFRKDFQFYKVREINNYHHAHDAYLNAVVGTALIKKYPKLESEFVYGDYKVYDVRKMIAKSEQEIGKATAKYFFYSNIMNFFKTEITLANGEIRKRPLIETNGETGEIVWDKGRDFATVRKVLSMPQVNIVKKTEVQTGGFSKESILPKRNSDKLIARKKDWDPKKYGGFDSPTVAYSVLVVAKVEKGKSKKLKSVKELLGITIMERSSFEKNPIDFLEAKGYKEVKKDLIIKLPKYSLFELENGRKRMLASAGELQKGNELALPSKYVNFLYLASHYEKLKGSPEDNEQKQLFVEQHKHYLDEIIEQISEFSKRVILADANLDKVLSAYNKHRDKPIREQAENIIHLFTLTNLGAPAAFKYFDTTIDRKRYTSTKEVLDATLIHQSITGLYETRIDLSQLGGDGGEAAAKGSSGGGGGVQEISDSRPMLHIYLNGRRFLGLLDTGADKTCIAGRDWPANWPIHQTESSLQGLGMACGVARSSQPLRWQHEDKSGIIHPFVIPTLPFTLWGRDIMKDIKVRLMTDSPDDSQDLMIGAIESNLFADQISWKSDQPVWLNQWPLKQEKLQALQQLVTEQLQLGHLEESNSPWNTPVFVIKKKSGKWRLLQDLRAVNATMHDMGALQPGLPSPVAVPKGWEIIIIDLQDCFFNIKLHPEDCKRFAFSVPSPNFKRPYQRFQWKVLPQGMKNSPTLCQKFVDKAILTVRDKYQDSYIVHYMDDILLAHPSRSIVDEILTSMIQALNKHGLVVSTEKIQKYDNLKYLGTHIQGDSVSYQKLQIRTDKLRTLNDFQKLLGNINWIRPFLKLTTGELKPLFEILNGDSNPISTRKLTPEACKALQLMNERLSTARVKRLDLSQPWSLCILKTEYTPTACLWQDGVVEWIHLPHISPKVITPYDIFCTQLIIKGRHRSKELFSKDPDYIVVPYTKVQFDLLLQEKEDWPISLLGFLGEVHFHLPKDPLLTFTLQTAIIFPHMTSTTPLEKGIVIFTDGSANGRSVTYIQGREPIIKENTQNTAQQAEIVAVITAFEEVSQPFNLYTDSKYVTGLFPEIETATLSPRTKIYTELKHLQRLIHKRQEKFYIGHIRGHTGLPGPLAQGNAYADSLTRILTAAGKRTADGSEFEKRTADGSEFESPKKKAKVE

SEQ ID NO: 7345 - protein, 2088 aa, synthetic construct
MPAAKRVKLDGGDKKYSIGLDIGTNSVGWAVITDEYKVPSKKFKVLGNTDRHSIKKNLIGALLFDSGETAEATRLKRTARRRYTRRKNRICYLQEIFSNEMAKVDDSFFHRLEESFLVEEDKKHERHPIFGNIVDEVAYHEKYPTIYHLRKKLVDSTDKADLRLIYLALAHMIKFRGHFLIEGDLNPDNSDVDKLFIQLVQTYNQLFEENPINASGVDAKAILSARLSKSRRLENLIAQLPGEKKNGLFGNLIALSLGLTPNFKSNFDLAEDAKLQLSKDTYDDDLDNLLAQIGDQYADLFLAAKNLSDAILLSDILRVNTEITKAPLSASMIKRYDEHHQDLTLLKALVRQQLPEKYKEIFFDQSKNGYAGYIDGGASQEEFYKFIKPILEKMDGTEELLVKLNREDLLRKQRTFDNGSIPHQIHLGELHAILRRQEDFYPFLKDNREKIEKILTFRIPYYVGPLARGNSRFAWMTRKSEETITPWNFEEVVDKGASAQSFIERMTNFDKNLPNEKVLPKHSLLYEYFTVYNELTKVKYVTEGMRKPAFLSGEQKKAIVDLLFKTNRKVTVKQLKEDYFKKIECFDSVEISGVEDRFNASLGTYHDLLKIIKDKDFLDNEENEDILEDIVLTLTLFEDREMIEERLKTYAHLFDDKVMKQLKRRRYTGWGRLSRKLINGIRDKQSGKTILDFLKSDGFANRNFMQLIHDDSLTFKEDIQKAQVSGQGDSLHEHIANLAGSPAIKKGILQTVKVVDELVKVMGRHKPENIVIEMARENQTTQKGQKNSRERMKRIEEGIKELGSQILKEHPVENTQLQNEKLYLYYLQNGRDMYVDQELDINRLSDYDVDHIVPQSFLKDDSIDNKVLTRSDKARGKSDNVPSEEVVKKMKNYWRQLLNAKLITQRKFDNLTKAERGGLSELDKAGFIKRQLVETRQITKHVAQILDSRMNTKYDENDKLIREVKVITLKSKLVSDFRKDFQFYKVREINNYHHAHDAYLNAVVGTALIKKYPKLESEFVYGDYKVYDVRKMIAKSEQEIGKATAKYFFYSNIMNFFKTEITLANGEIRKRPLIETNGETGEIVWDKGRDFATVRKVLSMPQVNIVKKTEVQTGGFSKESILPKRNSDKLIARKKDWDPKKYGGFDSPTVAYSVLVVAKVEKGKSKKLKSVKELLGITIMERSSFEKNPIDFLEAKGYKEVKKDLIIKLPKYSLFELENGRKRMLASAGELQKGNELALPSKYVNFLYLASHYEKLKGSPEDNEQKQLFVEQHKHYLDEIIEQISEFSKRVILADANLDKVLSAYNKHRDKPIREQAENIIHLFTLTNLGAPAAFKYFDTTIDRKRYTSTKEVLDATLIHQSITGLYETRIDLSQLGGDGGEAAAKGSSGGGGGLDDEYRLYSPLVKPDQNIQFWLEQFPQAWAETAGMGLAKQVPPQVIQLKASATPVSVRQYPLSKEAQEGIRPHVQRLIQQGILVPVQSPWNTPLLPVRKPGTNDYRPVQDLREVNKRVQDIHPTVPNPYNLLCALPPQRSWYTVLDLKDAFFCLRLHPTSQPLFAFEWRDPGTGRTGQLTWTRLPQGFKNSPTIFNEALHRDLANFRIQHPQVTLLQYVDDLLLAGATKQDCLEGTKALLLELSDLGYRASAKKAQICRREVTYLGYSLRDGQRWLTEARKKTVVQIPAPTTAKQVREFLGKAGFCRLFIPGFATLAAPLYPLTKPKGEFSWAPEHQKAFDAIKKALLSAPALALPDVTKPFTLYVDERKGVARGVLTQTLGPWRRPVAYLSKKLDPVASGWPVCLKAIAAVAILVKDADKLTLGQNITVIAPHALENIVRQPPDRWMTNARMTHYQSLLLTERVTFAPPAALNPATLLPEETDEPVTHDCHQLLIEETGVRKDLTDIPLTGEVLTWFTDGSSYVVEGKRMAGAAVVDGTRTIWASSLPEGTSAQKAELMALTQALRLAEGKSINIYTDSRYAFATAHVHGAIYKQRGWLTSAGREIKNKEEILSLLEALHLPKRLAIIHCPGHQKAKDPISRGNQMADRVAKQAAQGVNLLPAGKRTADGSEFEKRTADGSEFESPKKKAKVE

SEQ ID NO: 7346 - protein, 2088 aa, synthetic construct; identical to SEQ ID NO: 7345

SEQ ID NO: 7347 - protein, 2087 aa, synthetic construct
MPAAKRVKLDGGDKKYSIGLDIGTNSVGWAVITDEYKVPSKKFKVLGNTDRHSIKKNLIGALLFDSGETAEATRLKRTARRRYTRRKNRICYLQEIFSNEMAKVDDSFFHRLEESFLVEEDKKHERHPIFGNIVDEVAYHEKYPTIYHLRKKLVDSTDKADLRLIYLALAHMIKFRGHFLIEGDLNPDNSDVDKLFIQLVQTYNQLFEENPINASGVDAKAILSARLSKSRRLENLIAQLPGEKKNGLFGNLIALSLGLTPNFKSNFDLAEDAKLQLSKDTYDDDLDNLLAQIGDQYADLFLAAKNLSDAILLSDILRVNTEITKAPLSASMIKRYDEHHQDLTLLKALVRQQLPEKYKEIFFDQSKNGYAGYIDGGASQEEFYKFIKPILEKMDGTEELLVKLNREDLLRKQRTFDNGSIPHQIHLGELHAILRRQEDFYPFLKDNREKIEKILTFRIPYYVGPLARGNSRFAWMTRKSEETITPWNFEEVVDKGASAQSFIERMTNFDKNLPNEKVLPKHSLLYEYFTVYNELTKVKYVTEGMRKPAFLSGEQKKAIVDLLFKTNRKVTVKQLKEDYFKKIECFDSVEISGVEDRFNASLGTYHDLLKIIKDKDFLDNEENEDILEDIVLTLTLFEDREMIEERLKTYAHLFDDKVMKQLKRRRYTGWGRLSRKLINGIRDKQSGKTILDFLKSDGFANRNFMQLIHDDSLTFKEDIQKAQVSGQGDSLHEHIANLAGSPAIKKGILQTVKVVDELVKVMGRHKPENIVIEMARENQTTQKGQKNSRERMKRIEEGIKELGSQILKEHPVENTQLQNEKLYLYYLQNGRDMYVDQELDINRLSDYDVDHIVPQSFLKDDSIDNKVLTRSDKARGKSDNVPSEEVVKKMKNYWRQLLNAKLITQRKFDNLTKAERGGLSELDKAGFIKRQLVETRQITKHVAQILDSRMNTKYDENDKLIREVKVITLKSKLVSDFRKDFQFYKVREINNYHHAHDAYLNAVVGTALIKKYPKLESEFVYGDYKVYDVRKMIAKSEQEIGKATAKYFFYSNIMNFFKTEITLANGEIRKRPLIETNGETGEIVWDKGRDFATVRKVLSMPQVNIVKKTEVQTGGFSKESILPKRNSDKLIARKKDWDPKKYGGFDSPTVAYSVLVVAKVEKGKSKKLKSVKELLGITIMERSSFEKNPIDFLEAKGYKEVKKDLIIKLPKYSLFELENGRKRMLASAGELQKGNELALPSKYVNFLYLASHYEKLKGSPEDNEQKQLFVEQHKHYLDEIIEQISEFSKRVILADANLDKVLSAYNKHRDKPIREQAENIIHLFTLTNLGAPAAFKYFDTTIDRKRYTSTKEVLDATLIHQSITGLYETRIDLSQLGGDGGEAAAKGSSGGGGGIPWLMKKPLQLTTLVPLQEYEERLLKQTMLTGSYKEKLQSLFLKYDALWQHWENQVGHRRIKPHHIATGTVNPRPQKQYPINPKAKASIQTVINDLLKQGVLIQQNSIMNTPVYPVPKPDGKWRMVLDYREVNKTIPLIAAQNQHSAGILSSIFRGKYKTTLDLSNGFWAHSITPESYWLTAFTWLGQQYCWTRLPQGFLNSPALFNADVVDLLKEVPNVQVYVDDIYISHDDPREHLEQLEKVFSLLLNAGYVVSLKKSEIAQHEVEFLGFNITKEGRGLTETFKQKLLNITPPRDLKQLQSILGKLNFARNFIPNFSELVKPLYNIIATAPGKYITWTTDNSQQLQNIISMLNSAENLEERNPEVRLIMKVNTSPSAGYIRFYNEFAKRPIMYLNYVYTKAEVKFTNTEKLLTTIHKGLIKALDLGMGQEILVYSPIVSMTKIQKTPLPERKALPIRWITWMSYLEDPRIQFHYDKTLPELQQVPTVTDDIIAKIKHPSEFSMVFYTDGSAIKHPNVNKSHNAGMGIAQVQFKPEFTVINTWSIPLGDHTAQLAEVAAVEFACKKALKIDGPVLIVTDSFYVAESVNKELPYWQSNGFFNNKKKPLKHVSKWKSIADCIQLKPDIIIIHEKGHQPTASTFHTEGNNLADKLATQGSYVVNAGKRTADGSEFEKRTADGSEFESPKKKAKVE

SEQ ID NO: 7348 - protein, 2094 aa, synthetic construct
MPAAKRVKLDGGDKKYSIGLDIGTNSVGWAVITDEYKVPSKKFKVLGNTDRHSIKKNLIGALLFDSGETAEATRLKRTARRRYTRRKNRICYLQEIFSNEMAKVDDSFFHRLEESFLVEEDKKHERHPIFGNIVDEVAYHEKYPTIYHLRKKLVDSTDKADLRLIYLALAHMIKFRGHFLIEGDLNPDNSDVDKLFIQLVQTYNQLFEENPINASGVDAKAILSARLSKSRRLENLIAQLPGEKKNGLFGNLIALSLGLTPNFKSNFDLAEDAKLQLSKDTYDDDLDNLLAQIGDQYADLFLAAKNLSDAILLSDILRVNTEITKAPLSASMIKRYDEHHQDLTLLKALVRQQLPEKYKEIFFDQSKNGYAGYIDGGASQEEFYKFIKPILEKMDGTEELLVKLNREDLLRKQRTFDNGSIPHQIHLGELHAILRRQEDFYPFLKDNREKIEKILTFRIPYYVGPLARGNSRFAWMTRKSEETITPWNFEEVVDKGASAQSFIERMTNFDKNLPNEKVLPKHSLLYEYFTVYNELTKVKYVTEGMRKPAFLSGEQKKAIVDLLFKTNRKVTVKQLKEDYFKKIECFDSVEISGVEDRFNASLGTYHDLLKIIKDKDFLDNEENEDILEDIVLTLTLFEDREMIEERLKTYAHLFDDKVMKQLKRRRYTGWGRLSRKLINGIRDKQSGKTILDFLKSDGFANRNFMQLIHDDSLTFKEDIQKAQVSGQGDSLHEHIANLAGSPAIKKGILQTVKVVDELVKVMGRHKPENIVIEMARENQTTQKGQKNSRERMKRIEEGIKELGSQILKEHPVENTQLQNEKLYLYYLQNGRDMYVDQELDINRLSDYDVDHIVPQSFLKDDSIDNKVLTRSDKARGKSDNVPSEEVVKKMKNYWRQLLNAKLITQRKFDNLTKAERGGLSELDKAGFIKRQLVETRQITKHVAQILDSRMNTKYDENDKLIREVKVITLKSKLVSDFRKDFQFYKVREINNYHHAHDAYLNAVVGTALIKKYPKLESEFVYGDYKVYDVRKMIAKSEQEIGKATAKYFFYSNIMNFFKTEITLANGEIRKRPLIETNGETGEIVWDKGRDFATVRKVLSMPQVNIVKKTEVQTGGFSKESILPKRNSDKLIARKKDWDPKKYGGFDSPTVAYSVLVVAKVEKGKSKKLKSVKELLGITIMERSSFEKNPIDFLEAKGYKEVKKDLIIKLPKYSLFELENGRKRMLASAGELQKGNELALPSKYVNFLYLASHYEKLKGSPEDNEQKQLFVEQHKHYLDEIIEQISEFSKRVILADANLDKVLSAYNKHRDKPIREQAENIIHLFTLTNLGAPAAFKYFDTTIDRKRYTSTKEVLDATLIHQSITGLYETRIDLSQLGGDGGEAAAKGSSGGGGGVLNLEEEYRLHEKPVPSSIDPSWLQLFPTVWAERAGMGLANQVPPVVVELRSGASPVAVRQYPMSKEAREGIRPHIQRFLDLGVLVPCQSPWNTPLLPVKKPGTNDYRPVQDLREINKRVQDIHPTVPNPYNLLSSLPPSHTWYSVLDLKDAFFCLKLHPNSQPLFAFEWRDPEKGNTGQLTWTRLPQGFKNSPTLFDEALHRDLAPFRALNPQVVLLQYVDDLLVAAPTYRDCKEGTQKLLQELSKLGYRVSAKKAQLCQKEVTYLGYLLKEGKRWLTPARKATVMKIPPPTTPRQVREFLGTAGFCRLWIPGFASLAAPLYPLTKESIPFIWTEEHQKAFDRIKEALLSAPALALPDLTKPFTLYVDERAGVARGVLTQTLGPWRRPVAYLSKKLDPVASGWPTCLKAVAAVALLLKDADKLTLGQNVTVIASHSLESIVRQPPDRWMTNARMTHYQSLLLNERVSFAPPAVLNPATLLPVESEATPVHRCSEILAEETGTRRDLKDQPLPGVPAWYTDGSSFIAEGKRRAGAAIVDGKRTVWASSLPEGTSAQKAELVALTQALRLAEGKDINIYTDSRYAFATAHIHGAIYKQRGLLTSAGKDIKNKEEILALLEAIHLPKRVAIIHCPGHQKGNDPVATGNRRADEAAKQAALSTRVLAETTKPAGKRTADGSEFEKRTADGSEFESPKKKAKVE

SEQ ID NO: 7349 - protein, 2094 aa, synthetic construct
MPAAKRVKLDGGDKKYSIGLDIGTNSVGWAVITDEYKVPSKKFKVLGNTDRHSIKKNLIGALLFDSGETAEATRLKRTARRRYTRRKNRICYLQEIFSNEMAKVDDSFFHRLEESFLVEEDKKHERHPIFGNIVDEVAYHEKYPTIYHLRKKLVDSTDKADLRLIYLALAHMIKFRGHFLIEGDLNPDNSDVDKLFIQLVQTYNQLFEENPINASGVDAKAILSARLSKSRRLENLIAQLPGEKKNGLFGNLIALSLGLTPNFKSNFDLAEDAKLQLSKDTYDDDLDNLLAQIGDQYADLFLAAKNLSDAILLSDILRVNTEITKAPLSASMIKRYDEHHQDLTLLKALVRQQLPEKYKEIFFDQSKNGYAGYIDGGASQEEFYKFIKPILEKMDGTEELLVKLNREDLLRKQRTFDNGSIPHQIHLGELHAILRRQEDFYPFLKDNREKIEKILTFRIPYYVGPLARGNSRFAWMTRKSEETITPWNFEEVVDKGASAQSFIERMTNFDKNLPNEKVLPKHSLLYEYFTVYNELTKVKYVTEGMRKPAFLSGEQKKAIVDLLFKTNRKVTVKQLKEDYFKKIECFDSVEISGVEDRFNASLGTYHDLLKIIKDKDFLDNEENEDILEDIVLTLTLFEDREMIEERLKTYAHLFDDKVMKQLKRRRYTGWGRLSRKLINGIRDKQSGKTILDFLKSDGFANRNFMQLIHDDSLTFKEDIQKAQVSGQGDSLHEHIANLAGSPAIKKGILQTVKVVDELVKVMGRHKPENIVIEMARENQTTQKGQKNSRERMKRIEEGIKELGSQILKEHPVENTQLQNEKLYLYYLQNGRDMYVDQELDINRLSDYDVDHIVPQSFLKDDSIDNKVLTRSDKARGKSDNVPSEEVVKKMKNYWRQLLNAKLITQRKFDNLTKAERGGLSELDKAGFIKRQLVETRQITKHVAQILDSRMNTKYDENDKLIREVKVITLKSKLVSDFRKDFQFYKVREINNYHHAHDAYLNAVVGTALIKKYPKLESEFVYGDYKVYDVRKMIAKSEQEIGKATAKYFFYSNIMNFFKTEITLANGEIRKRPLIETNGETGEIVWDKGRDFATVRKVLSMPQVNIVKKTEVQTGGFSKESILPKRNSDKLIARKKDWDPKKYGGFDSPTVAYSVLVVAKVEKGKSKKLKSVKELLGITIMERSSFEKNPIDFLEAKGYKEVKKDLIIKLPKYSLFELENGRKRMLASAGELQKGNELALPSKYVNFLYLASHYEKLKGSPEDNEQKQLFVEQHKHYLDEIIEQISEFSKRVILADANLDKVLSAYNKHRDKPIREQAENIIHLFTLTNLGAPAAFKYFDTTIDRKRYTSTKEVLDATLIHQSITGLYETRIDLSQLGGDGGEAAAKGSSGGGGGVLNLEEEYRLHEKPVPSSIDPSWLQLFPTVWAERAGMGLANQVPPVVVELRSGASPVAVRQYPMSKEAREGIRPHIQRFLDLGVLVPCQSPWNTPLLPVKKPGTNDYRPVQDLREINKRVQDIHPTVPNPYNLLSSLPPSHTWYSVLDLKDAFFCLKLHPNSQPLFAFEWRDPEKGNTGQLTWTRLPQGFKNSPTLFNEALHRDLAPFRALNPQVVLLQYVDDLLVAAPTYRDCKEGTQKLLQELSKLGYRVSAKKAQLCQKEVTYLGYLLKEGKRWLTPARKATVMKIPPPTTPRQVREFLGTAGFCRLWIPGFASLAAPLYPLTKPSIPFIWTEEHQKAFDRIKEALLSAPALALPDLTKPFTLYVDERAGVARGVLTQTLGPWRRPVAYLSKKLDPVASGWPTCLKAVAAVALLLKDADKLTLGQNVTVIASHSLESIVRQPPDRWMTNARMTHYQSLLLNERVSFAPPAVLNPATLLPVESEATPVHRCSEILAEETGTRRDLKDQPLPGVPAWYTDGSSFIAEGKRRAGAAIVDGKRTVWASSLPEGTSAQKAELVALTQALRLAEGKDINIYTDSRYAFATAHIHGAIYKQRGWLTSAGKDIKNKEEILALLEAIHLPKRVAIIHCPGHQKGNDPVATGNRRADEAAKQAALSTRVLAETTKPAGKRTADGSEFEKRTADGSEFESPKKKAKVE

SEQ ID NO: 7350 - protein, 2096 aa, synthetic construct
MPAAKRVKLDGGDKKYSIGLDIGTNSVGWAVITDEYKVPSKKFKVLGNTDRHSIKKNLIGALLFDSGETAEATRLKRTARRRYTRRKNRICYLQEIFSNEMAKVDDSFFHRLEESFLVEEDKKHERHPIFGNIVDEVAYHEKYPTIYHLRKKLVDSTDKADLRLIYLALAHMIKFRGHFLIEGDLNPDNSDVDKLFIQLVQTYNQLFEENPINASGVDAKAILSARLSKSRRLENLIAQLPGEKKNGLFGNLIALSLGLTPNFKSNFDLAEDAKLQLSKDTYDDDLDNLLAQIGDQYADLFLAAKNLSDAILLSDILRVNTEITKAPLSASMIKRYDEHHQDLTLLKALVRQQLPEKYKEIFFDQSKNGYAGYIDGGASQEEFYKFIKPILEKMDGTEELLVKLNREDLLRKQRTFDNGSIPHQIHLGELHAILRRQEDFYPFLKDNREKIEKILTFRIPYYVGPLARGNSRFAWMTRKSEETITPWNFEEVVDKGASAQSFIERMTNFDKNLPNEKVLPKHSLLYEYFTVYNELTKVKYVTEGMRKPAFLSGEQKKAIVDLLFKTNRKVTVKQLKEDYFKKIECFDSVEISGVEDRFNASLGTYHDLLKIIKDKDFLDNEENEDILEDIVLTLTLFEDREMIEERLKTYAHLFDDKVMKQLKRRRYTGWGRLSRKLINGIRDKQSGKTILDFLKSDGFANRNFMQLIHDDSLTFKEDIQKAQVSGQGDSLHEHIANLAGSPAIKKGILQTVKVVDELVKVMGRHKPENIVIEMARENQTTQKGQKNSRERMKRIEEGIKELGSQILKEHPVENTQLQNEKLYLYYLQNGRDMYVDQELDINRLSDYDVDHIVPQSFLKDDSIDNKVLTRSDKARGKSDNVPSEEVVKKMKNYWRQLLNAKLITQRKFDNLTKAERGGLSELDKAGFIKRQLVETRQITKHVAQILDSRMNTKYDENDKLIREVKVITLKSKLVSDFRKDFQFYKVREINNYHHAHDAYLNAVVGTALIKKYPKLESEFVYGDYKVYDVRKMIAKSEQEIGKATAKYFFYSNIMNFFKTEITLANGEIRKRPLIETNGETGEIVWDKGRDFATVRKVLSMPQVNIVKKTEVQTGGFSKESILPKRNSDKLIARKKDWDPKKYGGFDSPTVAYSVLVVAKVEKGKSKKLKSVKELLGITIMERSSFEKNPIDFLEAKGYKEVKKDLIIKLPKYSLFELENGRKRMLASAGELQKGNELALPSKYVNFLYLASHYEKLKGSPEDNEQKQLFVEQHKHYLDEIIEQISEFSKRVILADANLDKVLSAYNKHRDKPIREQAENIIHLFTLTNLGAPAAFKYFDTTIDRKRYTSTKEVLDATLIHQSITGLYETRIDLSQLGGDGGEAAAKGSSGGGGGTLNIEDEYRLHETSKEPDVPLGSTWLSDFPQAWAETGGMGLAVRQAPLIIPLKATSTPVSIKQYPMSQEARLGIKPHIQRLLDQGILVPCQSPWNTPLLPVKKPGTNDYRPVQDLREVNKRVEDIHPTVPNPYNLLSGLPPSHQWYTVLDLKDAFFCLRLHPTSQPLFAFEWRDPEMGISGQLTWTRLPQGFKNSPTLFNEALHRDLADFRIQHPDLILLQYVDDLLLAATSEQDCQRGTRALLQTLGNLGYRASAKKAQICQKQVKYLGYLLKEGQRWLTEARKETVMGQPTPKTPRQLREFLGTAGFCRLWIPGFAEMAAPLYPLTKPGTLFNWGPDQQKAYQEIKQALLTAPALGLPDLTKPFELFVDEKQGYAKGVLTQKLGPWRRPVAYLSKKLDPVAAGWPPCLRMVAAIAVLTKDAGKLTMGQPLVILAPHAVEALVKQPPDRWLSNARMTHYQAMLLDTDRVQFGPVVALNPATLLPLPEKEAPHDCLEILAETHGTRPDLTDQPIPDADYTWYTDGSSFLQEGQRRAGAAVTTETEVIWARALPAGTSAQRAELIALTQALKMAEGKKLNVYTDSRYAFATAHVHGEIYRRRGWLTSEGREIKNKNEILALLKALFLPKRLSIIHCPGHQKGNSAEARGNRMADQAAREAAMKAVLETSTLLAGKRTADGSEFEKRTADGSEFESPKKKAKVE

SEQ ID NO: 7351 - protein, 2096 aa, synthetic construct
MPAAKRVKLDGGDKKYSIGLDIGTNSVGWAVITDEYKVPSKKFKVLGNTDRHSIKKNLIGALLFDSGETAEATRLKRTARRRYTRRKNRICYLQEIFSNEMAKVDDSFFHRLEESFLVEEDKKHERHPIFGNIVDEVAYHEKYPTIYHLRKKLVDSTDKADLRLIYLALAHMIKFRGHFLIEGDLNPDNSDVDKLFIQLVQTYNQLFEENPINASGVDAKAILSARLSKSRRLENLIAQLPGEKKNGLFGNLIALSLGLTPNFKSNFDLAEDAKLQLSKDTYDDDLDNLLAQIGDQYADLFLAAKNLSDAILLSDILRVNTEITKAPLSASMIKRYDEHHQDLTLLKALVRQQLPEKYKEIFFDQSKNGYAGYIDGGASQEEFYKFIKPILEKMDGTEELLVKLNREDLLRKQRTFDNGSIPHQIHLGELHAILRRQEDFYPFLKDNREKIEKILTFRIPYYVGPLARGNSRFAWMTRKSEETITPWNFEEVVDKGASAQSFIERMTNFDKNLPNEKVLPKHSLLYEYFTVYNELTKVKYVTEGMRKPAFLSGEQKKAIVDLLFKTNRKVTVKQLKEDYFKKIECFDSVEISGVEDRFNASLGTYHDLLKIIKDKDFLDNEENEDILEDIVLTLTLFEDREMIEERLKTYAHLFDDKVMKQLKRRRYTGWGRLSRKLINGIRDKQSGKTILDFLKSDGFANRNFMQLIHDDSLTFKEDIQKAQVSGQGDSLHEHIANLAGSPAIKKGILQTVKVVDELVKVMGRHKPENIVIEMARENQTTQKGQKNSRERMKRIEEGIKELGSQILKEHPVENTQLQNEKLYLYYLQNGRDMYVDQELDINRLSDYDVDHIVPQSFLKDDSIDNKVLTRSDKARGKSDNVPSEEVVKKMKNYWRQLLNAKLITQRKFDNLTKAERGGLSELDKAGFIKRQLVETRQITKHVAQILDSRMNTKYDENDKLIREVKVITLKSKLVSDFRKDFQFYKVREINNYHHAHDAYLNAVVGTALIKKYPKLESEFVYGDYKVYDVRKMIAKSEQEIGKATAKYFFYSNIMNFFKTEITLANGEIRKRPLIETNGETGEIVWDKGRDFATVRKVLSMPQVNIVKKTEVQTGGFSKESILPKRNSDKLIARKKDWDPKKYGGFDSPTVAYSVLVVAKVEKGKSKKLKSVKELLGITIMERSSFEKNPIDFLEAKGYKEVKKDLIIKLPKYSLFELENGRKRMLASAGELQKGNELALPSKYVNFLYLASHYEKLKGSPEDNEQKQLFVEQHKHYLDEIIEQISEFSKRVILADANLDKVLSAYNKHRDKPIREQAENIIHLFTLTNLGAPAAFKYFDTTIDRKRYTSTKEVLDATLIHQSITGLYETRIDLSQLGGDGGGGGGSSPAPGGTAPLEEEYRLFLEAPIQNVTLLEQWKREIPKVWAEINPPGLASTQAPIHVQLLSTALPVRVRQYPITLEAKRSLRETIRKFRAAGILRPVHSPWNTPLLPVRKSGTSEYRMVQDLREVNKRVETIHPTVPNPYTLLSLLPPDRIWYSVLDLKDAFFCIPLAPESQLIFAFEWADAEEGESGQLTWTRLPQGFKNSPTLFNEALNRDLQGFRLDHPSVSLLQYVDDLLIAADTQAACLSATRDLLMTLAELGYRVSGKKAQLCQEEVTYLGFKIHKGSRSLSNSRTQAILQIPVPKTKRQVREFLGKIGYCRLFIPGFAELAQPLYAATRPGNDPLVWGEKEEEAFQSLKLALTQPPALALPSLDKPFQLFVEETSGAAKGVLTQALGPWKRPVAYLSKRLDPVAAGWPRCLRAIAAAALLTREASKLTFGQDIEITSSHNLESLLRSPPDKWLTNARITQYQVLLLDPPRVRFKQTAALNPATLLPETDDTLPIHHCLDTLDSLTSTRPDLTDQPLAQAEATLFTDGSSYIRDGKRYAGAAVVTLDSVIWAEPLPIGTSAQKAELIALTKALEWSKDKSVNIYTDSRYAFATLHVHGMIYRERGWLTAGGKAIKNAPEILALLTAVWLPKRVAVMHCKGHQKDDAPTSTGNRRADEVAREVAIRPLSTQATISAGKRTADGSEFEKRTADGSEFESPKKKAKVE

SEQ ID NO: 7352 - protein, 2093 aa, synthetic construct
MPAAKRVKLDGGDKKYSIGLDIGTNSVGWAVITDEYKVPSKKFKVLGNTDRHSIKKNLIGALLFDSGETAEATRLKRTARRRYTRRKNRICYLQEIFSNEMAKVDDSFFHRLEESFLVEEDKKHERHPIFGNIVDEVAYHEKYPTIYHLRKKLVDSTDKADLRLIYLALAHMIKFRGHFLIEGDLNPDNSDVDKLFIQLVQTYNQLFEENPINASGVDAKAILSARLSKSRRLENLIAQLPGEKKNGLFGNLIALSLGLTPNFKSNFDLAEDAKLQLSKDTYDDDLDNLLAQIGDQYADLFLAAKNLSDAILLSDILRVNTEITKAPLSASMIKRYDEHHQDLTLLKALVRQQLPEKYKEIFFDQSKNGYAGYIDGGASQEEFYKFIKPILEKMDGTEELLVKLNREDLLRKQRTFDNGSIPHQIHLGELHAILRRQEDFYPFLKDNREKIEKILTFRIPYYVGPLARGNSRFAWMTRKSEETITPWNFEEVVDKGASAQSFIERMTNFDKNLPNEKVLPKHSLLYEYFTVYNELTKVKYVTEGMRKPAFLSGEQKKAIVDLLFKTNRKVTVKQLKEDYFKKIECFDSVEISGVEDRFNASLGTYHDLLKIIKDKDFLDNEENEDILEDIVLTLTLFEDREMIEERLKTYAHLFDDKVMKQLKRRRYTGWGRLSRKLINGIRDKQSGKTILDFLKSDGFANRNFMQLIHDDSLTFKEDIQKAQVSGQGDSLHEHIANLAGSPAIKKGILQTVKVVDELVKVMGRHKPENIVIEMARENQTTQKGQKNSRERMKRIEEGIKELGSQILKEHPVENTQLQNEKLYLYYLQNGRDMYVDQELDINRLSDYDVDHIVPQSFLKDDSIDNKVLTRSDKARGKSDNVPSEEVVKKMKNYWRQLLNAKLITQRKFDNLTKAERGGLSELDKAGFIKRQLVETRQITKHVAQILDSRMNTKYDENDKLIREVKVITLKSKLVSDFRKDFQFYKVREINNYHHAHDAYLNAVVGTALIKKYPKLESEFVYGDYKVYDVRKMIAKSEQEIGKATAKYFFYSNIMNFFKTEITLANGEIRKRPLIETNGETGEIVWDKGRDFATVRKVLSMPQVNIVKKTEVQTGGFSKESILPKRNSDKLIARKKDWDPKKYGGFDSPTVAYSVLVVAKVEKGKSKKLKSVKELLGITIMERSSFEKNPIDFLEAKGYKEVKKDLIIKLPKYSLFELENGRKRMLASAGELQKGNELALPSKYVNFLYLASHYEKLKGSPEDNEQKQLFVEQHKHYLDEIIEQISEFSKRVILADANLDKVLSAYNKHRDKPIREQAENIIHLFTLTNLGAPAAFKYFDTTIDRKRYTSTKEVLDATLIHQSITGLYETRIDLSQLGGDGGGGGGSSPAPGGTLQLEEEYRLFEPESTQKQEMDIWLKNFPQAWAETGGMGTAHCQAPVLIQLKATATPISIRQYPMPHEAYQGIKPHIRRMLDQGILKPCQSPWNTPLLPVKKPGTEDYRPVQDLREVNKRVEDIHPTVPNPYNLLSTLPPSHPWYTVLDLKDAFFCLRLHSESQLLFAFEWRDPEIGLSGQLTWTRLPQGFKNSPTLFNEALHSDLADFRVRYPALVLLQYVDDLLLAAATRTECLEGTKALLETLGNKGYRASAKKAQICLQEVTYLGYSLKDGQRWLTKARKEAILSIPVPKNSRQVREFLGKAGYCRLFIPGFAELAAPLYPLTRPGTLFQWGTEQQLAFEDIKKALLSSPALGLPDITKPFELFIDENSGFAKGVLVQKLGPWKRPVAYLSKKLDTVASGWPPCLRMVAAIAILVKDAGKLTLGQPLTILTSHPVEALVRQPPNKWLSNARMTHYQAMLLDAERVHFGPTVSLNPATLLPLPSGGNHHDCLQILAETHGTRPDLTDQPLPDADLTWYTDGSSFIRNGEREAGAAVTTESEVIWAAPLPPGTSAQRAELIALTQALKMAEGKKLTVYTDSRYAFATTHVHGEIYRRRGWLTSEGKEIKNKNEILALLEALFLPKRLSIIHCPGHQKGDSPQAKGNRLADDTAKKAATETHSSLTVLPAGKRTADGSEFEKRTADGSEFESPKKKAKVE

SEQ ID NO: 7353 - protein, 2216 aa, synthetic construct
MPAAKRVKLDGGDKKYSIGLDIGTNSVGWAVITDEYKVPSKKFKVLGNTDRHSIKKNLIGALLFDSGETAEATRLKRTARRRYTRRKNRICYLQEIFSNEMAKVDDSFFHRLEESFLVEEDKKHERHPIFGNIVDEVAYHEKYPTIYHLRKKLVDSTDKADLRLIYLALAHMIKFRGHFLIEGDLNPDNSDVDKLFIQLVQTYNQLFEENPINASGVDAKAILSARLSKSRRLENLIAQLPGEKKNGLFGNLIALSLGLTPNFKSNFDLAEDAKLQLSKDTYDDDLDNLLAQIGDQYADLFLAAKNLSDAILLSDILRVNTEITKAPLSASMIKRYDEHHQDLTLLKALVRQQLPEKYKEIFFDQSKNGYAGYIDGGASQEEFYKFIKPILEKMDGTEELLVKLNREDLLRKQRTFDNGSIPHQIHLGELHAILRRQEDFYPFLKDNREKIEKILTFRIPYYVGPLARGNSRFAWMTRKSEETITPWNFEEVVDKGASAQSFIERMTNFDKNLPNEKVLPKHSLLYEYFTVYNELTKVKYVTEGMRKPAFLSGEQKKAIVDLLFKTNRKVTVKQLKEDYFKKIECFDSVEISGVEDRFNASLGTYHDLLKIIKDKDFLDNEENEDILEDIVLTLTLFEDREMIEERLKTYAHLFDDKVMKQLKRRRYTGWGRLSRKLINGIRDKQSGKTILDFLKSDGFANRNFMQLIHDDSLTFKEDIQKAQVSGQGDSLHEHIANLAGSPAIKKGILQTVKVVDELVKVMGRHKPENIVIEMARENQTTQKGQKNSRERMKRIEEGIKELGSQILKEHPVENTQLQNEKLYLYYLQNGRDMYVDQELDINRLSDYDVDHIVPQSFLKDDSIDNKVLTRSDKARGKSDNVPSEEVVKKMKNYWRQLLNAKLITQRKFDNLTKAERGGLSELDKAGFIKRQLVETRQITKHVAQILDSRMNTKYDENDKLIREVKVITLKSKLVSDFRKDFQFYKVREINNYHHAHDAYLNAVVGTALIKKYPKLESEFVYGDYKVYDVRKMIAKSEQEIGKATAKYFFYSNIMNFFKTEITLANGEIRKRPLIETNGETGEIVWDKGRDFATVRKVLSMPQVNIVKKTEVQTGGFSKESILPKRNSDKLIARKKDWDPKKYGGFDSPTVAYSVLVVAKVEKGKSKKLKSVKELLGITIMERSSFEKNPIDFLEAKGYKEVKKDLIIKLPKYSLFELENGRKRMLASAGELQKGNELALPSKYVNFLYLASHYEKLKGSPEDNEQKQLFVEQHKHYLDEIIEQISEFSKRVILADANLDKVLSAYNKHRDKPIREQAENIIHLFTLTNLGAPAAFKYFDTTIDRKRYTSTKEVLDATLIHQSITGLYETRIDLSQLGGDGGGGGGSSPAPGGTLGDQGSRGSDPLPEPRVTLTVEGIPTEFLVNTGAEHSVLTKPMGKMGSKRTVVAGATGSKVYPWTTKRLLKIGQKQVTHSFLVIPECPAPLLGRDLLTKLKAQIQFSTEGPQVTWEDRPAMCLVLNLEEEYRLHEKPVPPSIDPSWLQLFPMVWAEKAGMGLANQVPPVVVELKSDASPVAVRQYPMSKEAREGIRPHIQRFLDLGILVPCQSPWNTPLLPVKKPGTNDYRPVQDLREVNKRVQDIHPTVPNPYNLLSSLPPSHTWYSVLDLKDAFFCLKLHPNSQPLFAFEWRDPEKGNTGQLTWTRLPQGFKNSPTLFDEALHRDLASFRALNPQVVMLQYVDDLLVAAPTYRDCKEGTRRLLQELSKLGYRVSAKKAQLCREEVTYLGYLLKGGKRWLTPARKATVMKIPTPTTPRQVREFLGTAGFCRLWIPGFASLAAPLYPLTREKVPFTWTEAHQEAFGRIKEALLSAPALALPDLTKPFALYVDEKEGVARGVLTQTLGPWRRPVAYLSKKLDPVASGWPTCLKAIAAVALLLKDADKLTLGQNVLVIAPHNLESIVRQPPDRWMTNARMTHYQSLLLNERVSFAPPAILNPATLLPVESDDTPIHICSEILAEETGTRPDLRDQPLPGVPAWYTDGSSFIMDGRRQAGAAIVDNKRTVWASNLPEGTSAQKAELIALTQALRLAEGKSINIYTDSRYAFATAHVHGAIYKQRGLLTSAGKDIKNKEEILALLEAIHLPKRVAIIHCPGHQRGTDPVATGNRKADEAAKQAAQSTRILTETTKNAGKRTADGSEFEKRTADGSEFESPKKKAKVE

SEQ ID NO: 7354 - protein, 2125 aa, synthetic construct
MPAAKRVKLDGGDKKYSIGLDIGTNSVGWAVITDEYKVPSKKFKVLGNTDRHSIKKNLIGALLFDSGETAEATRLKRTARRRYTRRKNRICYLQEIFSNEMAKVDDSFFHRLEESFLVEEDKKHERHPIFGNIVDEVAYHEKYPTIYHLRKKLVDSTDKADLRLIYLALAHMIKFRGHFLIEGDLNPDNSDVDKLFIQLVQTYNQLFEENPINASGVDAKAILSARLSKSRRLENLIAQLPGEKKNGLFGNLIALSLGLTPNFKSNFDLAEDAKLQLSKDTYDDDLDNLLAQIGDQYADLFLAAKNLSDAILLSDILRVNTEITKAPLSASMIKRYDEHHQDLTLLKALVRQQLPEKYKEIFFDQSKNGYAGYIDGGASQEEFYKFIKPILEKMDGTEELLVKLNREDLLRKQRTFDNGSIPHQIHLGELHAILRRQEDFYPFLKDNREKIEKILTFRIPYYVGPLARGNSRFAWMTRKSEETITPWNFEEVVDKGASAQSFIERMTNFDKNLPNEKVLPKHSLLYEYFTVYNELTKVKYVTEGMRKPAFLSGEQKKAIVDLLFKTNRKVTVKQLKEDYFKKIECFDSVEISGVEDRFNASLGTYHDLLKIIKDKDFLDNEENEDILEDIVLTLTLFEDREMIEERLKTYAHLFDDKVMKQLKRRRYTGWGRLSRKLINGIRDKQSGKTILDFLKSDGFANRNFMQLIHDDSLTFKEDIQKAQVSGQGDSLHEHIANLAGSPAIKKGILQTVKVVDELVKVMGRHKPENIVIEMARENQTTQKGQKNSRERMKRIEEGIKELGSQILKEHPVENTQLQNEKLYLYYLQNGRDMYVDQELDINRLSDYDVDHIVPQSFLKDDSIDNKVLTRSDKARGKSDNVPSEEVVKKMKNYWRQLLNAKLITQRKFDNLTKAERGGLSELDKAGFIKRQLVETRQITKHVAQILDSRMNTKYDENDKLIREVKVITLKSKLVSDFRKDFQFYKVREINNYHHAHDAYLNAVVGTALIKKYPKLESEFVYGDYKVYDVRKMIAKSEQEIGKATAKYFFYSNIMNFFKTEITLANGEIRKRPLIETNGETGEIVWDKGRDFATVRKVLSMPQVNIVKKTEVQTGGFSKESILPKRNSDKLIARKKDWDPKKYGGFDSPTVAYSVLVVAKVEKGKSKKLKSVKELLGITIMERSSFEKNPIDFLEAKGYKEVKKDLIIKLPKYSLFELENGRKRMLASAGELQKGNELALPSKYVNFLYLASHYEKLKGSPEDNEQKQLFVEQHKHYLDEIIEQISEFSKRVILADANLDKVLSAYNKHRDKPIREQAENIIHLFTLTNLGAPAAFKYFDTTIDRKRYTSTKEVLDATLIHQSITGLYETRIDLSQLGGDGGGGGGSSPAPGGLLGRDLLTKLKAQIQFSTEGPQVTWEDRPAMCLVLNLEEEYRLHEKPVPPSIDPSWLQLFPMVWAEKAGMGLANQVPPVVVELKSDASPVAVRQYPMSKEAREGIRPHIQRFLDLGILVPCQSPWNTPLLPVKKPGTNDYRPVQDLREVNKRVQDIHPTVPNPYNLLSSLPPSHTWYSVLDLKDAFFCLKLHPNSQPLFAFEWRDPEKGNTGQLTWTRLPQGFKNSPTLFNEALHRDLASFRALNPQVVMLQYVDDLLVAAPTYRDCKEGTRRLLQELSKLGYRVSAKKAQLCREEVTYLGYLLKGGKRWLTPARKATVMKIPTPTTPRQVREFLGTAGFCRLWIPGFASLAAPLYPLTRPKVPFTWTEAHQEAFGRIKEALLSAPALALPDLTKPFALYVDEKEGVARGVLTQTLGPWRRPVAYLSKKLDPVASGWPTCLKAIAAVALLLKDADKLTLGQNVLVIAPHNLESIVRQPPDRWMTNARMTHYQSLLLNERVSFAPPAILNPATLLPVESDDTPIHICSEILAEETGTRPDLRDQPLPGVPAWYTDGSSFIMDGRRQAGAAIVDNKRTVWASNLPEGTSAQKAELIALTQALRLAEGKSINIYTDSRYAFATAHVHGAIYKQRGWLTSAGKDIKNKEEILALLEAIHLPKRVAIIHCPGHQRGTDPVATGNRKADEAAKQAAQSTRILTETTKNAGKRTADGSEFEKRTADGSEFESPKKKAKVE

SEQ ID NO: 7355 - protein, 2216 aa, synthetic construct
MPAAKRVKLDGGDKKYSIGLDIGTNSVGWAVITDEYKVPSKKFKVLGNTDRHSIKKNLIGALLFDSGETAEATRLKRTARRRYTRRKNRICYLQEIFSNEMAKVDDSFFHRLEESFLVEEDKKHERHPIFGNIVDEVAYHEKYPTIYHLRKKLVDSTDKADLRLIYLALAHMIKFRGHFLIEGDLNPDNSDVDKLFIQLVQTYNQLFEENPINASGVDAKAILSARLSKSRRLENLIAQLPGEKKNGLFGNLIALSLGLTPNFKSNFDLAEDAKLQLSKDTYDDDLDNLLAQIGDQYADLFLAAKNLSDAILLSDILRVNTEITKAPLSASMIKRYDEHHQDLTLLKALVRQQLPEKYKEIFFDQSKNGYAGYIDGGASQEEFYKFIKPILEKMDGTEELLVKLNREDLLRKQRTFDNGSIPHQIHLGELHAILRRQEDFYPFLKDNREKIEKILTFRIPYYVGPLARGNSRFAWMTRKSEETITPWNFEEVVDKGASAQSFIERMTNFDKNLPNEKVLPKHSLLYEYFTVYNELTKVKYVTEGMRKPAFLSGEQKKAIVDLLFKTNRKVTVKQLKEDYFKKIECFDSVEISGVEDRFNASLGTYHDLLKIIKDKDFLDNEENEDILEDIVLTLTLFEDREMIEERLKTYAHLFDDKVMKQLKRRRYTGWGRLSRKLINGIRDKQSGKTILDFLKSDGFANRNFMQLIHDDSLTFKEDIQKAQVSGQGDSLHEHIANLAGSPAIKKGILQTVKVVDELVKVMGRHKPENIVIEMARENQTTQKGQKNSRERMKRIEEGIKELGSQILKEHPVENTQLQNEKLYLYYLQNGRDMYVDQELDINRLSDYDVDHIVPQSFLKDDSIDNKVLTRSDKARGKSDNVPSEEVVKKMKNYWRQLLNAKLITQRKFDNLTKAERGGLSELDKAGFIKRQLVETRQITKHVAQILDSRMNTKYDENDKLIREVKVITLKSKLVSDFRKDFQFYKVREINNYHHAHDAYLNAVVGTALIKKYPKLESEFVYGDYKVYDVRKMIAKSEQEIGKATAKYFFYSNIMNFFKTEITLANGEIRKRPLIETNGETGEIVWDKGRDFATVRKVLSMPQVNIVKKTEVQTGGFSKESILPKRNSDKLIARKKDWDPKKYGGFDSPTVAYSVLVVAKVEKGKSKKLKSVKELLGITIMERSSFEKNPIDFLEAKGYKEVKKDLIIKLPKYSLFELENGRKRMLASAGELQKGNELALPSKYVNFLYLASHYEKLKGSPEDNEQKQLFVEQHKHYLDEIIEQISEFSKRVILADANLDKVLSAYNKHRDKPIREQAENIIHLFTLTNLGAPAAFKYFDTTIDRKRYTSTKEVLDATLIHQSITGLYETRIDLSQLGGDGGGGGGSSPAPGGTLGDQGSRGSDPLPEPRVTLTVEGIPTEFLVNTGAEHSVLTKPMGKMGSKRTVVAGATGSKVYPWTTKRLLKIGQKQVTHSFLVIPECPAPLLGRDLLTKLKAQIQFSTEGPQVTWEDRPAMCLVLNLEEEYRLHEKPVPPSIDPSWLQLFPMVWAEKAGMGLANQVPPVVVELKSDASPVAVRQYPMSKEAREGIRPHIQRFLDLGILVPCQSPWNTPLLPVKKPGTNDYRPVQDLREVNKRVQDIHPTVPNPYNLLSSLPPSHTWYSVLDLKDAFFCLKLHPNSQPLFAFEWRDPEKGNTGQLTWTRLPQGFKNSPTLFNEALHRDLASFRALNPQVVMLQYVDDLLVAAPTYRDCKEGTRRLLQELSKLGYRVSAKKAQLCREEVTYLGYLLKGGKRWLTPARKATVMKIPTPTTPRQVREFLGTAGFCRLWIPGFASLAAPLYPLTRPKVPFTWTEAHQEAFGRIKEALLSAPALALPDLTKPFALYVDEKEGVARGVLTQTLGPWRRPVAYLSKKLDPVASGWPTCLKAIAAVALLLKDADKLTLGQNVLVIAPHNLESIVRQPPDRWMTNARMTHYQSLLLNERVSFAPPAILNPATLLPVESDDTPIHICSEILAEETGTRPDLRDQPLPGVPAWYTDGSSFIMDGRRQAGAAIVDNKRTVWASNLPEGTSAQKAELIALTQALRLAEGKSINIYTDSRYAFATAHVHGAIYKQRGWLTSAGKDIKNKEEILALLEAIHLPKRVAIIHCPGHQRGTDPVATGNRKADEAAKQAAQSTRILTETTKNAGKRTADGSEFEKRTADGSEFESPKKKAKVE

SEQ ID NO: 7356 - protein, 2094 aa, synthetic construct
MPAAKRVKLDGGDKKYSIGLDIGTNSVGWAVITDEYKVPSKKFKVLGNTDRHSIKKNLIGALLFDSGETAEATRLKRTARRRYTRRKNRICYLQEIFSNEMAKVDDSFFHRLEESFLVEEDKKHERHPIFGNIVDEVAYHEKYPTIYHLRKKLVDSTDKADLRLIYLALAHMIKFRGHFLIEGDLNPDNSDVDKLFIQLVQTYNQLFEENPINASGVDAKAILSARLSKSRRLENLIAQLPGEKKNGLFGNLIALSLGLTPNFKSNFDLAEDAKLQLSKDTYDDDLDNLLAQIGDQYADLFLAAKNLSDAILLSDILRVNTEITKAPLSASMIKRYDEHHQDLTLLKALVRQQLPEKYKEIFFDQSKNGYAGYIDGGASQEEFYKFIKPILEKMDGTEELLVKLNREDLLRKQRTFDNGSIPHQIHLGELHAILRRQEDFYPFLKDNREKIEKILTFRIPYYVGPLARGNSRFAWMTRKSEETITPWNFEEVVDKGASAQSFIERMTNFDKNLPNEKVLPKHSLLYEYFTVYNELTKVKYVTEGMRKPAFLSGEQKKAIVDLLFKTNRKVTVKQLKEDYFKKIECFDSVEISGVEDRFNASLGTYHDLLKIIKDKDFLDNEENEDILEDIVLTLTLFEDREMIEERLKTYAHLFDDKVMKQLKRRRYTGWGRLSRKLINGIRDKQSGKTILDFLKSDGFANRNFMQLIHDDSLTFKEDIQKAQVSGQGDSLHEHIANLAGSPAIKKGILQTVKVVDELVKVMGRHKPENIVIEMARENQTTQKGQKNSRERMKRIEEGIKELGSQILKEHPVENTQLQNEKLYLYYLQNGRDMYVDQELDINRLSDYDVDHIVPQSFLKDDSIDNKVLTRSDKARGKSDNVPSEEVVKKMKNYWRQLLNAKLITQRKFDNLTKAERGGLSELDKAGFIKRQLVETRQITKHVAQILDSRMNTKYDENDKLIREVKVITLKSKLVSDFRKDFQFYKVREINNYHHAHDAYLNAVVGTALIKKYPKLESEFVYGDYKVYDVRKMIAKSEQEIGKATAKYFFYSNIMNFFKTEITLANGEIRKRPLIETNGETGEIVWDKGRDFATVRKVLSMPQVNIVKKTEVQTGGFSKESILPKRNSDKLIARKKDWDPKKYGGFDSPTVAYSVLVVAKVEKGKSKKLKSVKELLGITIMERSSFEKNPIDFLEAKGYKEVKKDLIIKLPKYSLFELENGRKRMLASAGELQKGNELALPSKYVNFLYLASHYEKLKGSPEDNEQKQLFVEQHKHYLDEIIEQISEFSKRVILADANLDKVLSAYNKHRDKPIREQAENIIHLFTLTNLGAPAAFKYFDTTIDRKRYTSTKEVLDATLIHQSITGLYETRIDLSQLGGDGGGGGGSSPAPGGTLNLEDEYRLYETSAEPEVSPGSTWLSDFPQAWAETGGMGLAVRQAPLIIPLKATSTPVSIKQYPMSQEAKLGIKPHIQRLLDQGILVPCQSPWNTPLLPVKKPGTNDYRPVQDLREVNKRVEDIHPTVPNPYNLLSGLPPSHRWYTVLDLKDAFFCLRLHPTSQPLFAFEWRDPGMGISGQLTWTRLPQGFKNSPTLFNEALHRDLADFRIQHPDLILLQYVDDILLAATSELDCQQGTRALLLTLGNLGYRASAKKAQLCQKQVKYLGYLLKEGQRWLTEARKETVMGQPTPKTPRQLREFLGTAGFCRLWIPGFAEMAAPLYPLTKPGTLFNWGPDQQKAYQEIKQALLTAPALGLPDLTKPFELFVDEKQGYAKGVLTQKLGPWRRPVAYLSKKLDPVAAGWPPCLRMVAAIAVLRKDAGKLTMGQPLVILAPHAVEALVKQPPDRWLSNARMTHYQAMLLDTDRVQFGPVVALNPATLLPLPEEGAPHDCLEILAETHGTRPDLTDQPIPDADHTWYTDGSSFLQEGQRKAGAAVTTETEVIWARALPAGTSAQRAELIALTQALKMAEGKRLNVYTDSRYAFATAHIHGEIYRRRGWLTSEGREIKNKSEILALLKALFLPKRLSIIHCLGHQKGDSAEARGNRLADQAAREAAIKTPPDTSTLLAGKRTADGSEFEKRTADGSEFESPKKKAKVE

SEQ ID NO: 7357 - protein, 2094 aa, synthetic construct
MPAAKRVKLDGGDKKYSIGLDIGTNSVGWAVITDEYKVPSKKFKVLGNTDRHSIKKNLIGALLFDSGETAEATRLKRTARRRYTRRKNRICYLQEIFSNEMAKVDDSFFHRLEESFLVEEDKKHERHPIFGNIVDEVAYHEKYPTIYHLRKKLVDSTDKADLRLIYLALAHMIKFRGHFLIEGDLNPDNSDVDKLFIQLVQTYNQLFEENPINASGVDAKAILSARLSKSRRLENLIAQLPGEKKNGLFGNLIALSLGLTPNFKSNFDLAEDAKLQLSKDTYDDDLDNLLAQIGDQYADLFLAAKNLSDAILLSDILRVNTEITKAPLSASMIKRYDEHHQDLTLLKALVRQQLPEKYKEIFFDQSKNGYAGYIDGGASQEEFYKFIKPILEKMDGTEELLVKLNREDLLRKQRTFDNGSIPHQIHLGELHAILRRQEDFYPFLKDNREKIEKILTFRIPYYVGPLARGNSRFAWMTRKSEETITPWNFEEVVDKGASAQSFIERMTNFDKNLPNEKVLPKHSLLYEYFTVYNELTKVKYVTEGMRKPAFLSGEQKKAIVDLLFKTNRKVTVKQLKEDYFKKIECFDSVEISGVEDRFNASLGTYHDLLKIIKDKDFLDNEENEDILEDIVLTLTLFEDREMIEERLKTYAHLFDDKVMKQLKRRRYTGWGRLSRKLINGIRDKQSGKTILDFLKSDGFANRNFMQLIHDDSLTFKEDIQKAQVSGQGDSLHEHIANLAGSPAIKKGILQTVKVVDELVKVMGRHKPENIVIEMARENQTTQKGQKNSRERMKRIEEGIKELGSQILKEHPVENTQLQNEKLYLYYLQNGRDMYVDQELDINRLSDYDVDHIVPQSFLKDDSIDNKVLTRSDKARGKSDNVPSEEVVKKMKNYWRQLLNAKLITQRKFDNLTKAERGGLSELDKAGFIKRQLVETRQITKHVAQILDSRMNTKYDENDKLIREVKVITLKSKLVSDFRKDFQFYKVREINNYHHAHDAYLNAVVGTALIKKYPKLESEFVYGDYKVYDVRKMIAKSEQEIGKATAKYFFYSNIMNFFKTEITLANGEIRKRPLIETNGETGEIVWDKGRDFATVRKVLSMPQVNIVKKTEVQTGGFSKESILPKRNSDKLIARKKDWDPKKYGGFDSPTVAYSVLVVAKVEKGKSKKLKSVKELLGITIMERSSFEKNPIDFLEAKGYKEVKKDLIIKLPKYSLFELENGRKRMLASAGELQKGNELALPSKYVNFLYLASHYEKLKGSPEDNEQKQLFVEQHKHYLDEIIEQISEFSKRVILADANLDKVLSAYNKHRDKPIREQAENIIHLFTLTNLGAPAAFKYFDTTIDRKRYTSTKEVLDATLIHQSITGLYETRIDLSQLGGDGGGGGGSSPAPGGLGIEDEYRLHETSTEPDVSLGSTWLSDFPQAWAETGGMGLAVRQAPLIIPLKATSTPVSIQQYPMSHEARLGIKPHIQRLLDQGILVPCQSPWNTPLLPVKKPGTNDYRPVQDLREVNKRVEDIHPTVPNPYNLLSGLPPSHQWYTVLDLKDAFFCLRLHPTSQPLFAFEWRDPGMGISGQLTWTRLPQGFKNSPTLFNEALHRDLADFRIQHPDLILLQYVDDILLAATSELDCQQGTRALLQTLGDLGYRASAKKAQICQKQVKYLGYLLREGQRWLTEARKETVMGQPVPKTPRQLREFLGKAGFCRLFIPGFAEMAAPLYPLTKPGTLFSWGPDQQKAYQEIKQALLTAPALGLPDLTKPFELFVDEKQGYAKGVLTQKLGPWRRPVAYLSKKLDPVAAGWPPCLRMVAAIAVLTKDAGKLTMGQPLVILAPHAVEALVKQPPDRWLSNARMTHYQAMLLDTDRVQFGPVVALNPATLLPLPEEGAPHDCLEILAETHGTRPDLTDQPIPDADHTWYTDGSSFLQEGQRKAGAAVTTETEVIWAGALPAGTSAQRAELIALTQALKMAEGKRLNVYTDSRYAFATAHIHGEIYRRRGWLTSEGREIKNKSEILALLKALFLPKRLSIIHCLGHQKGDSAEARGNRLADQAAREAAIKTPPDTSTLLIAGKRTADGSEFEKRTADGSEFESPKKKAKVE

SEQ ID NO: 7358 - protein, 2094 aa, synthetic construct; identical to SEQ ID NO: 7357

SEQ ID NO: 7359 - protein, 2094 aa, synthetic construct
MPAAKRVKLDGGDKKYSIGLDIGTNSVGWAVITDEYKVPSKKFKVLGNTDRHSIKKNLIGALLFDSGETAEATRLKRTARRRYTRRKNRICYLQEIFSNEMAKVDDSFFHRLEESFLVEEDKKHERHPIFGNIVDEVAYHEKYPTIYHLRKKLVDSTDKADLRLIYLALAHMIKFRGHFLIEGDLNPDNSDVDKLFIQLVQTYNQLFEENPINASGVDAKAILSARLSKSRRLENLIAQLPGEKKNGLFGNLIALSLGLTPNFKSNFDLAEDAKLQLSKDTYDDDLDNLLAQIGDQYADLFLAAKNLSDAILLSDILRVNTEITKAPLSASMIKRYDEHHQDLTLLKALVRQQLPEKYKEIFFDQSKNGYAGYIDGGASQEEFYKFIKPILEKMDGTEELLVKLNREDLLRKQRTFDNGSIPHQIHLGELHAILRRQEDFYPFLKDNREKIEKILTFRIPYYVGPLARGNSRFAWMTRKSEETITPWNFEEVVDKGASAQSFIERMTNFDKNLPNEKVLPKHSLLYEYFTVYNELTKVKYVTEGMRKPAFLSGEQKKAIVDLLFKTNRKVTVKQLKEDYFKKIECFDSVEISGVEDRFNASLGTYHDLLKIIKDKDFLDNEENEDILEDIVLTLTLFEDREMIEERLKTYAHLFDDKVMKQLKRRRYTGWGRLSRKLINGIRDKQSGKTILDFLKSDGFANRNFMQLIHDDSLTFKEDIQKAQVSGQGDSLHEHIANLAGSPAIKKGILQTVKVVDELVKVMGRHKPENIVIEMARENQTTQKGQKNSRERMKRIEEGIKELGSQILKEHPVENTQLQNEKLYLYYLQNGRDMYVDQELDINRLSDYDVDHIVPQSFLKDDSIDNKVLTRSDKARGKSDNVPSEEVVKKMKNYWRQLLNAKLITQRKFDNLTKAERGGLSELDKAGFIKRQLVETRQITKHVAQILDSRMNTKYDENDKLIREVKVITLKSKLVSDFRKDFQFYKVREINNYHHAHDAYLNAVVGTALIKKYPKLESEFVYGDYKVYDVRKMIAKSEQEIGKATAKYFFYSNIMNFFKTEITLANGEIRKRPLIETNGETGEIVWDKGRDFATVRKVLSMPQVNIVKKTEVQTGGFSKESILPKRNSDKLIARKKDWDPKKYGGFDSPTVAYSVLVVAKVEKGKSKKLKSVKELLGITIMERSSFEKNPIDFLEAKGYKEVKKDLIIKLPKYSLFELENGRKRMLASAGELQKGNELALPSKYVNFLYLASHYEKLKGSPEDNEQKQLFVEQHKHYLDEIIEQISEFSKRVILADANLDKVLSAYNKHRDKPIREQAENIIHLFTLTNLGAPAAFKYFDTTIDRKRYTSTKEVLDATLIHQSITGLYETRIDLSQLGGDGGGGGGSSPAPGGTLNIEDEYRLHETSKEPDVSLGSTWLSDFPQAWAETGGMGLAVRQAPLIIPLKATSTPVSIKQYPMSQEARLGIKPHIQRLLDQGILVPCQSPWNTPLLPVKKPGTNDYRPVQDLREVNKRVEDIHPTVPNPYNLLSGLPPSHQWYTVLDLKDAFFCLRLHPTSQPLFAFEWRDPEMGISGQLTWTRLPQGFKNSPTLFNEALHRDLAGFRIQHPDLILLQYVDDLLLAATSELDCQQGTRALLQTLGDLGYRASAKKAQICQKQVKYLGYLLKEGQRWLTEARKETVMGQPIPKTPRQLREFLGTAGFCRLWIPGFAEMAAPLYPLTKPGTLFNWGPDQQKAFQEIKQALLTAPALGLPDLTKPFELFVDEKQGYAKGVLTQKLGPWRRPVAYLSKKLDPVAAGWPPCLRMVAAIAVLTKDAGKLTMGQPLVILAPHAVEALVKQPPDRWLSNARMTHYQALLLDTDRVQFGPVVALNPATLLPLPEEGLQHDCLDILAEAHGTRSDLMDQPLPDADHTWYTDGSSFLQEGQRKAGAAVTTETEVIWARALPAGTSAQRAELIALTQALKMAEGKKLNVYTDSRYAFATAHIHGEIYRRRGWLTSEGKEIKNKDEILALLKALFLPKRLSIIHCPGHQKGNSAEARGNRMADQAAREVATRETPETSTLLAGKRTADGSEFEKRTADGSEFESPKKKAKVE

SEQ ID NO: 7360 - protein, 2094 aa, synthetic construct
MPAAKRVKLDGGDKKYSIGLDIGTNSVGWAVITDEYKVPSKKFKVLGNTDRHSIKKNLIGALLFDSGETAEATRLKRTARRRYTRRKNRICYLQEIFSNEMAKVDDSFFHRLEESFLVEEDKKHERHPIFGNIVDEVAYHEKYPTIYHLRKKLVDSTDKADLRLIYLALAHMIKFRGHFLIEGDLNPDNSDVDKLFIQLVQTYNQLFEENPINASGVDAKAILSARLSKSRRLENLIAQLPGEKKNGLFGNLIALSLGLTPNFKSNFDLAEDAKLQLSKDTYDDDLDNLLAQIGDQYADLFLAAKNLSDAILLSDILRVNTEITKAPLSASMIKRYDEHHQDLTLLKALVRQQLPEKYKEIFFDQSKNGYAGYIDGGASQEEFYKFIKPILEKMDGTEELLVKLNREDLLRKQRTFDNGSIPHQIHLGELHAILRRQEDFYPFLKDNREKIEKILTFRIPYYVGPLARGNSRFAWMTRKSEETITPWNFEEVVDKGASAQSFIERMTNFDKNLPNEKVLPKHSLLYEYFTVYNELTKVKYVTEGMRKPAFLSGEQKKAIVDLLFKTNRKVTVKQLKEDYFKKIECFDSVEISGVEDRFNASLGTYHDLLKIIKDKDFLDNEENEDILEDIVLTLTLFEDREMIEERLKTYAHLFDDKVMKQLKRRRYTGWGRLSRKLINGIRDKQSGKTILDFLKSDGFANRNFMQLIHDDSLTFKEDIQKAQVSGQGDSLHEHIANLAGSPAIKKGILQTVKVVDELVKVMGRHKPENIVIEMARENQTTQKGQKNSRERMKRIEEGIKELGSQILKEHPVENTQLQNEKLYLYYLQNGRDMYVDQELDINRLSDYDVDHIVPQSFLKDDSIDNKVLTRSDKARGKSDNVPSEEVVKKMKNYWRQLLNAKLITQRKFDNLTKAERGGLSELDKAGFIKRQLVETRQITKHVAQILDSRMNTKYDENDKLIREVKVITLKSKLVSDFRKDFQFYKVREINNYHHAHDAYLNAVVGTALIKKYPKLESEFVYGDYKVYDVRKMIAKSEQEIGKATAKYFFYSNIMNFFKTEITLANGEIRKRPLIETNGETGEIVWDKGRDFATVRKVLSMPQVNIVKKTEVQTGGFSKESILPKRNSDKLIARKKDWDPKKYGGFDSPTVAYSVLVVAKVEKGKSKKLKSVKELLGITIMERSSFEKNPIDFLEAKGYKEVKKDLIIKLPKYSLFELENGRKRMLASAGELQKGNELALPSKYVNFLYLASHYEKLKGSPEDNEQKQLFVEQHKHYLDEIIEQISEFSKRVILADANLDKVLSAYNKHRDKPIREQAENIIHLFTLTNLGAPAAFKYFDTTIDRKRYTSTKEVLDATLIHQSITGLYETRIDLSQLGGDGGGGGGSSPAPGGTLNIEDEYRLHETSKGPDVPLGSTWLSDFPQAWAETGGMGLAVRQAPLIIPLKATSTPVSIKQYPMSQEARLGIKPHIQRLLDQGILVPCQSPWNTPLLPVKKPGTNDYRPVQDLREVNKRVEDIHPTVPNPYNLLSGLPPSHQWYTVLDLKDAFFCLRLHPTSQSLFAFEWRDPEMGISGQLTWTRLPQGFKNSPTLFNEALHRDLADFRIQHPDLILLQYVDDLLLAATSELDCQQGTRALLQTLGDLGYRASAKKAQICQKQVKYLGYLLKEGQRWLTEARKETVMGQPTPKTPRQLREFLGTAGFCRLWIPGFAEMAAPLYPLTKPGTLFEWGPDQQKAYQEIKQALLTAPALGLPDLTKPFELFVDEKQGYAKGVLTQKLGPWRRPVAYLSKKLDPVAAGWPPCLRMVAAIAVLTKDAGKLTMGQPLVILAPHAVEALVKQPPDRWLSNARMTHYQALLLDTDRVQFGPIVALNPATLLPLPEEGLQHDCLDILAEAHGTRPDLTDQPLPDADHTWYTDGSSFLQEGQRKAGAAVTTETEVVWAKALPAGTSAQRAELIALTQALKMAEGKKLNVYTDSRYAFATAHIHGEIYRRRGWLTSEGKEIKNKDEILALLKALFLPKRLSIIHCPGHQKGNRAEARGNRMADQAAREVATRETPETSTLLAGKRTADGSEFEKRTADGSEFESPKKKAKVE

SEQ ID NO: 7361 - protein, 2088 aa, synthetic construct
MPAAKRVKLDGGDKKYSIGLDIGTNSVGWAVITDEYKVPSKKFKVLGNTDRHSIKKNLIGALLFDSGETAEATRLKRTARRRYTRRKNRICYLQEIFSNEMAKVDDSFFHRLEESFLVEEDKKHERHPIFGNIVDEVAYHEKYPTIYHLRKKLVDSTDKADLRLIYLALAHMIKFRGHFLIEGDLNPDNSDVDKLFIQLVQTYNQLFEENPINASGVDAKAILSARLSKSRRLENLIAQLPGEKKNGLFGNLIALSLGLTPNFKSNFDLAEDAKLQLSKDTYDDDLDNLLAQIGDQYADLFLAAKNLSDAILLSDILRVNTEITKAPLSASMIKRYDEHHQDLTLLKALVRQQLPEKYKEIFFDQSKNGYAGYIDGGASQEEFYKFIKPILEKMDGTEELLVKLNREDLLRKQRTFDNGSIPHQIHLGELHAILRRQEDFYPFLKDNREKIEKILTFRIPYYVGPLARGNSRFAWMTRKSEETITPWNFEEVVDKGASAQSFIERMTNFDKNLPNEKVLPKHSLLYEYFTVYNELTKVKYVTEGMRKPAFLSGEQKKAIVDLLFKTNRKVTVKQLKEDYFKKIECFDSVEISGVEDRFNASLGTYHDLLKIIKDKDFLDNEENEDILEDIVLTLTLFEDREMIEERLKTYAHLFDDKVMKQLKRRRYTGWGRLSRKLINGIRDKQSGKTILDFLKSDGFANRNFMQLIHDDSLTFKEDIQKAQVSGQGDSLHEHIANLAGSPAIKKGILQTVKVVDELVKVMGRHKPENIVIEMARENQTTQKGQKNSRERMKRIEEGIKELGSQILKEHPVENTQLQNEKLYLYYLQNGRDMYVDQELDINRLSDYDVDHIVPQSFLKDDSIDNKVLTRSDKARGKSDNVPSEEVVKKMKNYWRQLLNAKLITQRKFDNLTKAERGGLSELDKAGFIKRQLVETRQITKHVAQILDSRMNTKYDENDKLIREVKVITLKSKLVSDFRKDFQFYKVREINNYHHAHDAYLNAVVGTALIKKYPKLESEFVYGDYKVYDVRKMIAKSEQEIGKATAKYFFYSNIMNFFKTEITLANGEIRKRPLIETNGETGEIVWDKGRDFATVRKVLSMPQVNIVKKTEVQTGGFSKESILPKRNSDKLIARKKDWDPKKYGGFDSPTVAYSVLVVAKVEKGKSKKLKSVKELLGITIMERSSFEKNPIDFLEAKGYKEVKKDLIIKLPKYSLFELENGRKRMLASAGELQKGNELALPSKYVNFLYLASHYEKLKGSPEDNEQKQLFVEQHKHYLDEIIEQISEFSKRVILADANLDKVLSAYNKHRDKPIREQAENIIHLFTLTNLGAPAAFKYFDTTIDRKRYTSTKEVLDATLIHQSITGLYETRIDLSQLGGDGGGGGGSSPAPGGTLQLDDEYRLYSPLVKPDQNIQFWLEQFPQAWAETAGMGLAKQVPPQVIQLKASATPVSVRQYPLSKEAQEGIRPHVQRLIQQGILVPVQSPWNTPLLPVRKPGTNDYRPVQDLREVNKRVQDIHPTVPNPYNLLCALPPQRSWYTVLDLKDAFFCLRLHPTSQPLFAFEWRDPGTGRTGQLTWTRLPQGFKNSPTIFDEALHRDLANFRIQHPQVTLLQYVDDLLLAGATKQDCLEGTKALLLELSDLGYRASAKKAQICRREVTYLGYSLRDGQRWLTEARKKTVVQIPAPTTAKQVREFLGTAGFCRLWIPGFATLAAPLYPLTKEKGEFSWAPEHQKAFDAIKKALLSAPALALPDVTKPFTLYVDERKGVARGVLTQTLGPWRRPVAYLSKKLDPVASGWPVCLKAIAAVAILVKDADKLTLGQNITVIAPHALENIVRQPPDRWMTNARMTHYQSLLLTERVTFAPPAALNPATLLPEETDEPVTHDCHQLLIEETGVRKDLTDIPLTGEVLTWFTDGSSYVVEGKRMAGAAVVDGTRTIWASSLPEGTSAQKAELMALTQALRLAEGKSINIYTDSRYAFATAHVHGAIYKQRGLLTSAGREIKNKEEILSLLEALHLPKRLAIIHCPGHQKAKDPISRGNQMADRVAKQAAQGVNLLAGKRTADGSEFEKRTADGSEFESPKKKAKVE

SEQ ID NO: 7362 - protein, 2085 aa, synthetic construct
MPAAKRVKLDGGDKKYSIGLDIGTNSVGWAVITDEYKVPSKKFKVLGNTDRHSIKKNLIGALLFDSGETAEATRLKRTARRRYTRRKNRICYLQEIFSNEMAKVDDSFFHRLEESFLVEEDKKHERHPIFGNIVDEVAYHEKYPTIYHLRKKLVDSTDKADLRLIYLALAHMIKFRGHFLIEGDLNPDNSDVDKLFIQLVQTYNQLFEENPINASGVDAKAILSARLSKSRRLENLIAQLPGEKKNGLFGNLIALSLGLTPNFKSNFDLAEDAKLQLSKDTYDDDLDNLLAQIGDQYADLFLAAKNLSDAILLSDILRVNTEITKAPLSASMIKRYDEHHQDLTLLKALVRQQLPEKYKEIFFDQSKNGYAGYIDGGASQEEFYKFIKPILEKMDGTEELLVKLNREDLLRKQRTFDNGSIPHQIHLGELHAILRRQEDFYPFLKDNREKIEKILTFRIPYYVGPLARGNSRFAWMTRKSEETITPWNFEEVVDKGASAQSFIERMTNFDKNLPNEKVLPKHSLLYEYFTVYNELTKVKYVTEGMRKPAFLSGEQKKAIVDLLFKTNRKVTVKQLKEDYFKKIECFDSVEISGVEDRFNASLGTYHDLLKIIKDKDFLDNEENEDILEDIVLTLTLFEDREMIEERLKTYAHLFDDKVMKQLKRRRYTGWGRLSRKLINGIRDKQSGKTILDFLKSDGFANRNFMQLIHDDSLTFKEDIQKAQVSGQGDSLHEHIANLAGSPAIKKGILQTVKVVDELVKVMGRHKPENIVIEMARENQTTQKGQKNSRERMKRIEEGIKELGSQILKEHPVENTQLQNEKLYLYYLQNGRDMYVDQELDINRLSDYDVDHIVPQSFLKDDSIDNKVLTRSDKARGKSDNVPSEEVVKKMKNYWRQLLNAKLITQRKFDNLTKAERGGLSELDKAGFIKRQLVETRQITKHVAQILDSRMNTKYDENDKLIREVKVITLKSKLVSDFRKDFQFYKVREINNYHHAHDAYLNAVVGTALIKKYPKLESEFVYGDYKVYDVRKMIAKSEQEIGKATAKYFFYSNIMNFFKTEITLANGEIRKRPLIETNGETGEIVWDKGRDFATVRKVLSMPQVNIVKKTEVQTGGFSKESILPKRNSDKLIARKKDWDPKKYGGFDSPTVAYSVLVVAKVEKGKSKKLKSVKELLGITIMERSSFEKNPIDFLEAKGYKEVKKDLIIKLPKYSLFELENGRKRMLASAGELQKGNELALPSKYVNFLYLASHYEKLKGSPEDNEQKQLFVEQHKHYLDEIIEQISEFSKRVILADANLDKVLSAYNKHRDKPIREQAENIIHLFTLTNLGAPAAFKYFDTTIDRKRYTSTKEVLDATLIHQSITGLYETRIDLSQLGGDGGGGGGSSPAPGGIPWLMKKPLQLTTLVPLQEYEERLLKQTMLTGSYKEKLQSLFLKYDALWQHWENQVGHRRIKPHHIATGTVNPRPQKQYPINPKAKASIQTVINDLLKQGVLIQQNSIMNTPVYPVPKPDGKWRMVLDYREVNKTIPLIAAQNQHSAGILSSIFRGKYKTTLDLSNGFWAHSITPESYWLTAFTWLGQQYCWTRLPQGFLNSPALFNADVVDLLKEVPNVQVYVDDIYISHDDPREHLEQLEKVFSLLLNAGYVVSLKKSEIAQHEVEFLGFNITKEGRGLTETFKQKLLNITPPRDLKQLQSILGKLNFARNFIPNFSELVKPLYNIIATAPGKYITWTTDNSQQLQNIISMLNSAENLEERNPEVRLIMKVNTSPSAGYIRFYNEFAKRPIMYLNYVYTKAEVKFTNTEKLLTTIHKGLIKALDLGMGQEILVYSPIVSMTKIQKTPLPERKALPIRWITWMSYLEDPRIQFHYDKTLPELQQVPTVTDDIIAKIKHPSEFSMVFYTDGSAIKHPNVNKSHNAGMGIAQVQFKPEFTVINTWSIPLGDHTAQLAEVAAVEFACKKALKIDGPVLIVTDSFYVAESVNKELPYWQSNGFFNNKKKPLKHVSKWKSIADCIQLKPDIIIIHEKGHQPTASTFHTEGNNLADKLATQGSYVVNAGKRTADGSEFEKRTADGSEFESPKKKAKVE

SEQ ID NO: 7363 - protein, 2174 aa, synthetic construct
MPAAKRVKLDGGDKKYSIGLDIGTNSVGWAVITDEYKVPSKKFKVLGNTDRHSIKKNLIGALLFDSGETAEATRLKRTARRRYTRRKNRICYLQEIFSNEMAKVDDSFFHRLEESFLVEEDKKHERHPIFGNIVDEVAYHEKYPTIYHLRKKLVDSTDKADLRLIYLALAHMIKFRGHFLIEGDLNPDNSDVDKLFIQLVQTYNQLFEENPINASGVDAKAILSARLSKSRRLENLIAQLPGEKKNGLFGNLIALSLGLTPNFKSNFDLAEDAKLQLSKDTYDDDLDNLLAQIGDQYADLFLAAKNLSDAILLSDILRVNTEITKAPLSASMIKRYDEHHQDLTLLKALVRQQLPEKYKEIFFDQSKNGYAGYIDGGASQEEFYKFIKPILEKMDGTEELLVKLNREDLLRKQRTFDNGSIPHQIHLGELHAILRRQEDFYPFLKDNREKIEKILTFRIPYYVGPLARGNSRFAWMTRKSEETITPWNFEEVVDKGASAQSFIERMTNFDKNLPNEKVLPKHSLLYEYFTVYNELTKVKYVTEGMRKPAFLSGEQKKAIVDLLFKTNRKVTVKQLKEDYFKKIECFDSVEISGVEDRFNASLGTYHDLLKIIKDKDFLDNEENEDILEDIVLTLTLFEDREMIEERLKTYAHLFDDKVMKQLKRRRYTGWGRLSRKLINGIRDKQSGKTILDFLKSDGFANRNFMQLIHDDSLTFKEDIQKAQVSGQGDSLHEHIANLAGSPAIKKGILQTVKVVDELVKVMGRHKPENIVIEMARENQTTQKGQKNSRERMKRIEEGIKELGSQILKEHPVENTQLQNEKLYLYYLQNGRDMYVDQELDINRLSDYDVDHIVPQSFLKDDSIDNKVLTRSDKARGKSDNVPSEEVVKKMKNYWRQLLNAKLITQRKFDNLTKAERGGLSELDKAGFIKRQLVETRQITKHVAQILDSRMNTKYDENDKLIREVKVITLKSKLVSDFRKDFQFYKVREINNYHHAHDAYLNAVVGTALIKKYPKLESEFVYGDYKVYDVRKMIAKSEQEIGKATAKYFFYSNIMNFFKTEITLANGEIRKRPLIETNGETGEIVWDKGRDFATVRKVLSMPQVNIVKKTEVQTGGFSKESILPKRNSDKLIARKKDWDPKKYGGFDSPTVAYSVLVVAKVEKGKSKKLKSVKELLGITIMERSSFEKNPIDFLEAKGYKEVKKDLIIKLPKYSLFELENGRKRMLASAGELQKGNELALPSKYVNFLYLASHYEKLKGSPEDNEQKQLFVEQHKHYLDEIIEQISEFSKRVILADANLDKVLSAYNKHRDKPIREQAENIIHLFTLTNLGAPAAFKYFDTTIDRKRYTSTKEVLDATLIHQSITGLYETRIDLSQLGGDGGGGGGSSPAPGGMNPLQLLQPLPAEVKGTKLLAHWNSGATITCIPESFLEDEQPIKQTLIKTIHGEKQQNVYYLTFKVKGRKVEAEVIASPYEYILLSPTDVPWLTQQPLQLTILVPLQEYQDRILNKTALPEEQKQQLKALFTKYDNLWQHWENQVGHRKIRPHNIATGDYPPRPQKQYPINPKAKPSIQIVIDDLLKQGVLTPQNSTMNTPVYPVPKPDGRWRMVLDYREVNKTIPLTAAQNQHSAGILATIVRQKYKTTLDLANGFWAHPITPDSYWLTAFTWQGKQYCWTRLPQGFLNSPALFTADAVDLLKEVPNVQVYVDDIYLSHDNPHEHIQQLEKVFQILLQAGYVVSLKKSEIGQRTVEFLGFNITKEGRGLTDTFKTKLLNVTPPKDLKQLQSILGLLNFARNFIPNFAELVQTLYNLIASSKGKYIEWTEDNTKQLNKVIEALNTASNLEERLPDQRLVIKVNTSPSAGYVRYYNESGKKPIMYLNYVFSKAELKFSMLEKLLTTMHKALIKAMDLAMGQEILVYSPIVSMTKIQKTPLPERKALPIRWITWMTYLEDPRIQFHYDKTLPELKHIPDVYTSSIPPLKHPSQYEGVFCTDGSAIKSPDPTKSNNAGMGIVHAIYNPEYKILNQWSIPLGHHTAQMAEIAAVEFACKKALKVPGPVLVITDSFYVAESANKELPYWKSNGFVNNKKEPLKHISKWKSIAECLSIKPDITIQHEKGHQPINTSIHTEGNALADKLATQGSYVVNAGKRTADGSEFEKRTADGSEFESPKKKAKVE

SEQ ID NO: 7364 - protein, 2093 aa, synthetic construct
MPAAKRVKLDGGDKKYSIGLDIGTNSVGWAVITDEYKVPSKKFKVLGNTDRHSIKKNLIGALLFDSGETAEATRLKRTARRRYTRRKNRICYLQEIFSNEMAKVDDSFFHRLEESFLVEEDKKHERHPIFGNIVDEVAYHEKYPTIYHLRKKLVDSTDKADLRLIYLALAHMIKFRGHFLIEGDLNPDNSDVDKLFIQLVQTYNQLFEENPINASGVDAKAILSARLSKSRRLENLIAQLPGEKKNGLFGNLIALSLGLTPNFKSNFDLAEDAKLQLSKDTYDDDLDNLLAQIGDQYADLFLAAKNLSDAILLSDILRVNTEITKAPLSASMIKRYDEHHQDLTLLKALVRQQLPEKYKEIFFDQSKNGYAGYIDGGASQEEFYKFIKPILEKMDGTEELLVKLNREDLLRKQRTFDNGSIPHQIHLGELHAILRRQEDFYPFLKDNREKIEKILTFRIPYYVGPLARGNSRFAWMTRKSEETITPWNFEEVVDKGASAQSFIERMTNFDKNLPNEKVLPKHSLLYEYFTVYNELTKVKYVTEGMRKPAFLSGEQKKAIVDLLFKTNRKVTVKQLKEDYFKKIECFDSVEISGVEDRFNASLGTYHDLLKIIKDKDFLDNEENEDILEDIVLTLTLFEDREMIEERLKTYAHLFDDKVMKQLKRRRYTGWGRLSRKLINGIRDKQSGKTILDFLKSDGFANRNFMQLIHDDSLTFKEDIQKAQVSGQGDSLHEHIANLAGSPAIKKGILQTVKVVDELVKVMGRHKPENIVIEMARENQTTQKGQKNSRERMKRIEEGIKELGSQILKEHPVENTQLQNEKLYLYYLQNGRDMYVDQELDINRLSDYDVDHIVPQSFLKDDSIDNKVLTRSDKARGKSDNVPSEEVVKKMKNYWRQLLNAKLITQRKFDNLTKAERGGLSELDKAGFIKRQLVETRQITKHVAQILDSRMNTKYDENDKLIREVKVITLKSKLVSDFRKDFQFYKVREINNYHHAHDAYLNAVVGTALIKKYPKLESEFVYGDYKVYDVRKMIAKSEQEIGKATAKYFFYSNIMNFFKTEITLANGEIRKRPLIETNGETGEIVWDKGRDFATVRKVLSMPQVNIVKKTEVQTGGFSKESILPKRNSDKLIARKKDWDPKKYGGFDSPTVAYSVLVVAKVEKGKSKKLKSVKELLGITIMERSSFEKNPIDFLEAKGYKEVKKDLIIKLPKYSLFELENGRKRMLASAGELQKGNELALPSKYVNFLYLASHYEKLKGSPEDNEQKQLFVEQHKHYLDEIIEQISEFSKRVILADANLDKVLSAYNKHRDKPIREQAENIIHLFTLTNLGAPAAFKYFDTTIDRKRYTSTKEVLDATLIHQSITGLYETRIDLSQLGGDGGGGGPAPGSSGGTLQLEEEYRLFEPESTQKQEMDIWLKNFPQAWAETGGMGTAHCQAPVLIQLKATATPISIRQYPMPHEAYQGIKPHIRRMLDQGILKPCQSPWNTPLLPVKKPGTEDYRPVQDLREVNKRVEDIHPTVPNPYNLLSTLPPSHPWYTVLDLKDAFFCLRLHSESQLLFAFEWRDPEIGLSGQLTWTRLPQGFKNSPTLFNEALHSDLADFRVRYPALVLLQYVDDLLLAAATRTECLEGTKALLETLGNKGYRASAKKAQICLQEVTYLGYSLKDGQRWLTKARKEAILSIPVPKNSRQVREFLGTAGYCRLWIPGFAELAAPLYPLTRPGTLFQWGTEQQLAFEDIKKALLSSPALGLPDITKPFELFIDENSGFAKGVLVQKLGPWKRPVAYLSKKLDTVASGWPPCLRMVAAIAILVKDAGKLTLGQPLTILTSHPVEALVRQPPNKWLSNARMTHYQAMLLDAERVHFGPTVSLNPATLLPLPSGGNHHDCLQILAETHGTRPDLTDQPLPDADLTWYTDGSSFIRNGEREAGAAVTTESEVIWAAPLPPGTSAQRAELIALTQALKMAEGKKLTVYTDSRYAFATTHVHGEIYRRRGWLTSEGKEIKNKNEILALLEALFLPKRLSIIHCPGHQKGDSPQAKGNRLADDTAKKAATETHSSLTVLPAGKRTADGSEFEKRTADGSEFESPKKKAKVE

SEQ ID NO: 7365 - protein, 2093 aa, synthetic construct
MPAAKRVKLDGGDKKYSIGLDIGTNSVGWAVITDEYKVPSKKFKVLGNTDRHSIKKNLIGALLFDSGETAEATRLKRTARRRYTRRKNRICYLQEIFSNEMAKVDDSFFHRLEESFLVEEDKKHERHPIFGNIVDEVAYHEKYPTIYHLRKKLVDSTDKADLRLIYLALAHMIKFRGHFLIEGDLNPDNSDVDKLFIQLVQTYNQLFEENPINASGVDAKAILSARLSKSRRLENLIAQLPGEKKNGLFGNLIALSLGLTPNFKSNFDLAEDAKLQLSKDTYDDDLDNLLAQIGDQYADLFLAAKNLSDAILLSDILRVNTEITKAPLSASMIKRYDEHHQDLTLLKALVRQQLPEKYKEIFFDQSKNGYAGYIDGGASQEEFYKFIKPILEKMDGTEELLVKLNREDLLRKQRTFDNGSIPHQIHLGELHAILRRQEDFYPFLKDNREKIEKILTFRIPYYVGPLARGNSRFAWMTRKSEETITPWNFEEVVDKGASAQSFIERMTNFDKNLPNEKVLPKHSLLYEYFTVYNELTKVKYVTEGMRKPAFLSGEQKKAIVDLLFKTNRKVTVKQLKEDYFKKIECFDSVEISGVEDRFNASLGTYHDLLKIIKDKDFLDNEENEDILEDIVLTLTLFEDREMIEERLKTYAHLFDDKVMKQLKRRRYTGWGRLSRKLINGIRDKQSGKTILDFLKSDGFANRNFMQLIHDDSLTFKEDIQKAQVSGQGDSLHEHIANLAGSPAIKKGILQTVKVVDELVKVMGRHKPENIVIEMARENQTTQKGQKNSRERMKRIEEGIKELGSQILKEHPVENTQLQNEKLYLYYLQNGRDMYVDQELDINRLSDYDVDHIVPQSFLKDDSIDNKVLTRSDKARGKSDNVPSEEVVKKMKNYWRQLLNAKLITQRKFDNLTKAERGGLSELDKAGFIKRQLVETRQITKHVAQILDSRMNTKYDENDKLIREVKVITLKSKLVSDFRKDFQFYKVREINNYHHAHDAYLNAVVGTALIKKYPKLESEFVYGDYKVYDVRKMIAKSEQEIGKATAKYFFYSNIMNFFKTEITLANGEIRKRPLIETNGETGEIVWDKGRDFATVRKVLSMPQVNIVKKTEVQTGGFSKESILPKRNSDKLIARKKDWDPKKYGGFDSPTVAYSVLVVAKVEKGKSKKLKSVKELLGITIMERSSFEKNPIDFLEAKGYKEVKKDLIIKLPKYSLFELENGRKRMLASAGELQKGNELALPSKYVNFLYLASHYEKLKGSPEDNEQKQLFVEQHKHYLDEIIEQISEFSKRVILADANLDKVLSAYNKHRDKPIREQAENIIHLFTLTNLGAPAAFKYFDTTIDRKRYTSTKEVLDATLIHQSITGLYETRIDLSQLGGDGGGGGPAPGSSGGTLQLEEEYRLFEPESTQKQEMDIWLKNFPQAWAETGGMGTAHCQAPVLIQLKATATPISIRQYPMPHEAYQGIKPHIRRMLDQGILKPCQSPWNTPLLPVKKPGTEDYRPVQDLREVNKRVEDIHPTVPNPYNLLSTLPPSHPWYTVLDLKDAFFCLRLHSESQLLFAFEWRDPEIGLSGQLTWTRLPQGFKNSPTLFNEALHSDLADFRVRYPALVLLQYVDDLLLAAATRTECLEGTKALLETLGNKGYRASAKKAQICLQEVTYLGYSLKDGQRWLTKARKEAILSIPVPKNSRQVREFLGKAGYCRLFIPGFAELAAPLYPLTRPGTLFQWGTEQQLAFEDIKKALLSSPALGLPDITKPFELFIDENSGFAKGVLVQKLGPWKRPVAYLSKKLDTVASGWPPCLRMVAAIAILVKDAGKLTLGQPLTILTSHPVEALVRQPPNKWLSNARMTHYQAMLLDAERVHFGPTVSLNPATLLPLPSGGNHHDCLQILAETHGTRPDLTDQPLPDADLTWYTDGSSFIRNGEREAGAAVTTESEVIWAAPLPPGTSAQRAELIALTQALKMAEGKKLTVYTDSRYAFATTHVHGEIYRRRGWLTSEGKEIKNKNEILALLEALFLPKRLSIIHCPGHQKGDSPQAKGNRLADDTAKKAATETHSSLTVLPAGKRTADGSEFEKRTADGSEFESPKKKAKVE

SEQ ID NO: 7366 - protein, 2174 aa, synthetic construct
MPAAKRVKLDGGDKKYSIGLDIGTNSVGWAVITDEYKVPSKKFKVLGNTDRHSIKKNLIGALLFDSGETAEATRLKRTARRRYTRRKNRICYLQEIFSNEMAKVDDSFFHRLEESFLVEEDKKHERHPIFGNIVDEVAYHEKYPTIYHLRKKLVDSTDKADLRLIYLALAHMIKFRGHFLIEGDLNPDNSDVDKLFIQLVQTYNQLFEENPINASGVDAKAILSARLSKSRRLENLIAQLPGEKKNGLFGNLIALSLGLTPNFKSNFDLAEDAKLQLSKDTYDDDLDNLLAQIGDQYADLFLAAKNLSDAILLSDILRVNTEITKAPLSASMIKRYDEHHQDLTLLKALVRQQLPEKYKEIFFDQSKNGYAGYIDGGASQEEFYKFIKPILEKMDGTEELLVKLNREDLLRKQRTFDNGSIPHQIHLGELHAILRRQEDFYPFLKDNREKIEKILTFRIPYYVGPLARGNSRFAWMTRKSEETITPWNFEEVVDKGASAQSFIERMTNFDKNLPNEKVLPKHSLLYEYFTVYNELTKVKYVTEGMRKPAFLSGEQKKAIVDLLFKTNRKVTVKQLKEDYFKKIECFDSVEISGVEDRFNASLGTYHDLLKIIKDKDFLDNEENEDILEDIVLTLTLFEDREMIEERLKTYAHLFDDKVMKQLKRRRYTGWGRLSRKLINGIRDKQSGKTILDFLKSDGFANRNFMQLIHDDSLTFKEDIQKAQVSGQGDSLHEHIANLAGSPAIKKGILQTVKVVDELVKVMGRHKPENIVIEMARENQTTQKGQKNSRERMKRIEEGIKELGSQILKEHPVENTQLQNEKLYLYYLQNGRDMYVDQELDINRLSDYDVDHIVPQSFLKDDSIDNKVLTRSDKARGKSDNVPSEEVVKKMKNYWRQLLNAKLITQRKFDNLTKAERGGLSELDKAGFIKRQLVETRQITKHVAQILDSRMNTKYDENDKLIREVKVITLKSKLVSDFRKDFQFYKVREINNYHHAHDAYLNAVVGTALIKKYPKLESEFVYGDYKVYDVRKMIAKSEQEIGKATAKYFFYSNIMNFFKTEITLANGEIRKRPLIETNGETGEIVWDKGRDFATVRKVLSMPQVNIVKKTEVQTGGFSKESILPKRNSDKLIARKKDWDPKKYGGFDSPTVAYSVLVVAKVEKGKSKKLKSVKELLGITIMERSSFEKNPIDFLEAKGYKEVKKDLIIKLPKYSLFELENGRKRMLASAGELQKGNELALPSKYVNFLYLASHYEKLKGSPEDNEQKQLFVEQHKHYLDEIIEQISEFSKRVILADANLDKVLSAYNKHRDKPIREQAENIIHLFTLTNLGAPAAFKYFDTTIDRKRYTSTKEVLDATLIHQSITGLYETRIDLSQLGGDGGGGGPAPGSSGGMNPLQLLQPLPAEIKGTKLLAHWNSGATITCIPESFLEDEQPIKKTLIKTIHGEKQQNVYYVTFKVKGRKVEAEVIASPYEYILLSPTDVPWLTQQPLQLTILVPLQEYQEKILSKTALPEDQKQQLKTLFVKYDNLWQHWENQVGHRKIRPHNIATGDYPPRPQKQYPINPKAKPSIQIVIDDLLKQGVLTPQNSTMNTPVYPVPKPDGRWRMVLDYREVNKTIPLTAAQNQHSAGILATIVRQKYKTTLDLANGFWAHPITPESYWLTAFTWQGKQYCWTRLPQGFLNSPALFNADVVDLLKEIPNVQVYVDDIYLSHDDPKEHVQQLEKVFQILLQAGYVVSLKKSEIGQKTVEFLGFNITKEGRGLTDTFKTKLLNITPPKDLKQLQSILGLLNFARNFIPNFAELVQPLYNLIAPAKGKYIEWSEENTKQLNMVIEALNTASNLEERLPEQRLVIKVNTSPSAGYVRYYNETGKKPIMYLNYVFSKAELKFSMLEKLLTTMHKALIKAMDLAMGQEILVYSPIVSMTKIQKTPLPERKALPIRWITWMTYLEDPRIQFHYDKTLPELKHIPDVYTSSQSPVKHPSQYEGVFYTDGSAIKSPDPTKSNNAGMGIVHATYKPEYQVLNQWSIPLGNHTAQMAEIAAVEFACKKALKIPGPVLVITDSFYVAESANKELPYWKSNGFVNNKKKPLKHISKWKSIAECLSMKPDITIQHEKGISLQIPVFILKGNALADKLATQGSYVVNAGKRTADGSEFEKRTADGSEFESPKKKAKVE

SEQ ID NO: 7367 - protein, 2007 aa, synthetic construct
MPAAKRVKLDGGDKKYSIGLDIGTNSVGWAVITDEYKVPSKKFKVLGNTDRHSIKKNLIGALLFDSGETAEATRLKRTARRRYTRRKNRICYLQEIFSNEMAKVDDSFFHRLEESFLVEEDKKHERHPIFGNIVDEVAYHEKYPTIYHLRKKLVDSTDKADLRLIYLALAHMIKFRGHFLIEGDLNPDNSDVDKLFIQLVQTYNQLFEENPINASGVDAKAILSARLSKSRRLENLIAQLPGEKKNGLFGNLIALSLGLTPNFKSNFDLAEDAKLQLSKDTYDDDLDNLLAQIGDQYADLFLAAKNLSDAILLSDILRVNTEITKAPLSASMIKRYDEHHQDLTLLKALVRQQLPEKYKEIFFDQSKNGYAGYIDGGASQEEFYKFIKPILEKMDGTEELLVKLNREDLLRKQRTFDNGSIPHQIHLGELHAILRRQEDFYPFLKDNREKIEKILTFRIPYYVGPLARGNSRFAWMTRKSEETITPWNFEEVVDKGASAQSFIERMTNFDKNLPNEKVLPKHSLLYEYFTVYNELTKVKYVTEGMRKPAFLSGEQKKAIVDLLFKTNRKVTVKQLKEDYFKKIECFDSVEISGVEDRFNASLGTYHDLLKIIKDKDFLDNEENEDILEDIVLTLTLFEDREMIEERLKTYAHLFDDKVMKQLKRRRYTGWGRLSRKLINGIRDKQSGKTILDFLKSDGFANRNFMQLIHDDSLTFKEDIQKAQVSGQGDSLHEHIANLAGSPAIKKGILQTVKVVDELVKVMGRHKPENIVIEMARENQTTQKGQKNSRERMKRIEEGIKELGSQILKEHPVENTQLQNEKLYLYYLQNGRDMYVDQELDINRLSDYDVDHIVPQSFLKDDSIDNKVLTRSDKARGKSDNVPSEEVVKKMKNYWRQLLNAKLITQRKFDNLTKAERGGLSELDKAGFIKRQLVETRQITKHVAQILDSRMNTKYDENDKLIREVKVITLKSKLVSDFRKDFQFYKVREINNYHHAHDAYLNAVVGTALIKKYPKLESEFVYGDYKVYDVRKMIAKSEQEIGKATAKYFFYSNIMNFFKTEITLANGEIRKRPLIETNGETGEIVWDKGRDFATVRKVLSMPQVNIVKKTEVQTGGFSKESILPKRNSDKLIARKKDWDPKKYGGFDSPTVAYSVLVVAKVEKGKSKKLKSVKELLGITIMERSSFEKNPIDFLEAKGYKEVKKDLIIKLPKYSLFELENGRKRMLASAGELQKGNELALPSKYVNFLYLASHYEKLKGSPEDNEQKQLFVEQHKHYLDEIIEQISEFSKRVILADANLDKVLSAYNKHRDKPIREQAENIIHLFTLTNLGAPAAFKYFDTTIDRKRYTSTKEVLDATLIHQSITGLYETRIDLSQLGGDGGGGGPAPGSSGGGLEHLPPPPEVSQFPLNPERLQALTDLVSRALEAKHIEPYQGPGNNPIFPVKKPNGKWRFIHDLRATNSLTRDLASPSPGPPDLTSLPQDLPHLRTIDLTDAFFQIPLPAVFQPYFAFTLPQPNNHGPGTRYSWRVLPQGFKNSPTLFQQQLSHILAPVRKAFPNSLIIQYMDDILLASPALRELTALTDKVTNALTKEGLPMSLEKTQATPGSIHFLGQVISPDCITYETLPSIHVKSIWSLAELQSMLGELQWVSKGTPVLRSSLHQLYLALRGHRDPRDTIELTSTQVQALKTIQKALALNCRSRLVSQLPILALIILRPTGTTAVLFQTKQKWPLVWLHTPHPATSLRPWGQLLANAIITLDKYSLQHYGQICKSFHHNISNQALTYYLHTSDQSSVAILLQHSHRFHNLGAQPSGPWRSLLQVPQIFQNIDVLRPPFIISPVVIDHAPCLFSDGATSKAAFILWDKQVIHQQVLPLPSTCSAQAGELFGLLAGLQKSKPWPALNIFLDSKFLIGHLRRMAWGAFLGPSTQCDLHARLFPLLQGKTVYVHHVRSHTLLQDPISRLNEATDALMLAPLLPLAGKRTADGSEFEKRTADGSEFESPKKKAKVE

SEQ ID NO: 7368 - protein, 2125 aa, synthetic construct
MPAAKRVKLDGGDKKYSIGLDIGTNSVGWAVITDEYKVPSKKFKVLGNTDRHSIKKNLIGALLFDSGETAEATRLKRTARRRYTRRKNRICYLQEIFSNEMAKVDDSFFHRLEESFLVEEDKKHERHPIFGNIVDEVAYHEKYPTIYHLRKKLVDSTDKADLRLIYLALAHMIKFRGHFLIEGDLNPDNSDVDKLFIQLVQTYNQLFEENPINASGVDAKAILSARLSKSRRLENLIAQLPGEKKNGLFGNLIALSLGLTPNFKSNFDLAEDAKLQLSKDTYDDDLDNLLAQIGDQYADLFLAAKNLSDAILLSDILRVNTEITKAPLSASMIKRYDEHHQDLTLLKALVRQQLPEKYKEIFFDQSKNGYAGYIDGGASQEEFYKFIKPILEKMDGTEELLVKLNREDLLRKQRTFDNGSIPHQIHLGELHAILRRQEDFYPFLKDNREKIEKILTFRIPYYVGPLARGNSRFAWMTRKSEETITPWNFEEVVDKGASAQSFIERMTNFDKNLPNEKVLPKHSLLYEYFTVYNELTKVKYVTEGMRKPAFLSGEQKKAIVDLLFKTNRKVTVKQLKEDYFKKIECFDSVEISGVEDRFNASLGTYHDLLKIIKDKDFLDNEENEDILEDIVLTLTLFEDREMIEERLKTYAHLFDDKVMKQLKRRRYTGWGRLSRKLINGIRDKQSGKTILDFLKSDGFANRNFMQLIHDDSLTFKEDIQKAQVSGQGDSLHEHIANLAGSPAIKKGILQTVKVVDELVKVMGRHKPENIVIEMARENQTTQKGQKNSRERMKRIEEGIKELGSQILKEHPVENTQLQNEKLYLYYLQNGRDMYVDQELDINRLSDYDVDHIVPQSFLKDDSIDNKVLTRSDKARGKSDNVPSEEVVKKMKNYWRQLLNAKLITQRKFDNLTKAERGGLSELDKAGFIKRQLVETRQITKHVAQILDSRMNTKYDENDKLIREVKVITLKSKLVSDFRKDFQFYKVREINNYHHAHDAYLNAVVGTALIKKYPKLESEFVYGDYKVYDVRKMIAKSEQEIGKATAKYFFYSNIMNFFKTEITLANGEIRKRPLIETNGETGEIVWDKGRDFATVRKVLSMPQVNIVKKTEVQTGGFSKESILPKRNSDKLIARKKDWDPKKYGGFDSPTVAYSVLVVAKVEKGKSKKLKSVKELLGITIMERSSFEKNPIDFLEAKGYKEVKKDLIIKLPKYSLFELENGRKRMLASAGELQKGNELALPSKYVNFLYLASHYEKLKGSPEDNEQKQLFVEQHKHYLDEIIEQISEFSKRVILADANLDKVLSAYNKHRDKPIREQAENIIHLFTLTNLGAPAAFKYFDTTIDRKRYTSTKEVLDATLIHQSITGLYETRIDLSQLGGDGGGGGPAPGSSGGLLGRDLLTKLKAQIQFSTEGPQVTWEDRPAMCLVLNLEEEYRLHEKPVPPSIDPSWLQLFPMVWAEKAGMGLANQVPPVVVELKSDASPVAVRQYPMSKEAREGIRPHIQRFLDLGILVPCQSPWNTPLLPVKKPGTNDYRPVQDLREVNKRVQDIHPTVPNPYNLLSSLPPSHTWYSVLDLKDAFFCLKLHPNSQPLFAFEWRDPEKGNTGQLTWTRLPQGFKNSPTLFNEALHRDLASFRALNPQVVMLQYVDDLLVAAPTYRDCKEGTRRLLQELSKLGYRVSAKKAQLCREEVTYLGYLLKGGKRWLTPARKATVMKIPTPTTPRQVREFLGTAGFCRLWIPGFASLAAPLYPLTRPKVPFTWTEAHQEAFGRIKEALLSAPALALPDLTKPFALYVDEKEGVARGVLTQTLGPWRRPVAYLSKKLDPVASGWPTCLKAIAAVALLLKDADKLTLGQNVLVIAPHNLESIVRQPPDRWMTNARMTHYQSLLLNERVSFAPPAILNPATLLPVESDDTPIHICSEILAEETGTRPDLRDQPLPGVPAWYTDGSSFIMDGRRQAGAAIVDNKRTVWASNLPEGTSAQKAELIALTQALRLAEGKSINIYTDSRYAFATAHVHGAIYKQRGWLTSAGKDIKNKEEILALLEAIHLPKRVAIIHCPGHQRGTDPVATGNRKADEAAKQAAQSTRILTETTKNAGKRTADGSEFEKRTADGSEFESPKKKAKVE

SEQ ID NO: 7369 - protein, 2125 aa, synthetic construct
MPAAKRVKLDGGDKKYSIGLDIGTNSVGWAVITDEYKVPSKKFKVLGNTDRHSIKKNLIGALLFDSGETAEATRLKRTARRRYTRRKNRICYLQEIFSNEMAKVDDSFFHRLEESFLVEEDKKHERHPIFGNIVDEVAYHEKYPTIYHLRKKLVDSTDKADLRLIYLALAHMIKFRGHFLIEGDLNPDNSDVDKLFIQLVQTYNQLFEENPINASGVDAKAILSARLSKSRRLENLIAQLPGEKKNGLFGNLIALSLGLTPNFKSNFDLAEDAKLQLSKDTYDDDLDNLLAQIGDQYADLFLAAKNLSDAILLSDILRVNTEITKAPLSASMIKRYDEHHQDLTLLKALVRQQLPEKYKEIFFDQSKNGYAGYIDGGASQEEFYKFIKPILEKMDGTEELLVKLNREDLLRKQRTFDNGSIPHQIHLGELHAILRRQEDFYPFLKDNREKIEKILTFRIPYYVGPLARGNSRFAWMTRKSEETITPWNFEEVVDKGASAQSFIERMTNFDKNLPNEKVLPKHSLLYEYFTVYNELTKVKYVTEGMRKPAFLSGEQKKAIVDLLFKTNRKVTVKQLKEDYFKKIECFDSVEISGVEDRFNASLGTYHDLLKIIKDKDFLDNEENEDILEDIVLTLTLFEDREMIEERLKTYAHLFDDKVMKQLKRRRYTGWGRLSRKLINGIRDKQSGKTILDFLKSDGFANRNFMQLIHDDSLTFKEDIQKAQVSGQGDSLHEHIANLAGSPAIKKGILQTVKVVDELVKVMGRHKPENIVIEMARENQTTQKGQKNSRERMKRIEEGIKELGSQILKEHPVENTQLQNEKLYLYYLQNGRDMYVDQELDINRLSDYDVDHIVPQSFLKDDSIDNKVLTRSDKARGKSDNVPSEEVVKKMKNYWRQLLNAKLITQRKFDNLTKAERGGLSELDKAGFIKRQLVETRQITKHVAQILDSRMNTKYDENDKLIREVKVITLKSKLVSDFRKDFQFYKVREINNYHHAHDAYLNAVVGTALIKKYPKLESEFVYGDYKVYDVRKMIAKSEQEIGKATAKYFFYSNIMNFFKTEITLANGEIRKRPLIETNGETGEIVWDKGRDFATVRKVLSMPQVNIVKKTEVQTGGFSKESILPKRNSDKLIARKKDWDPKKYGGFDSPTVAYSVLVVAKVEKGKSKKLKSVKELLGITIMERSSFEKNPIDFLEAKGYKEVKKDLIIKLPKYSLFELENGRKRMLASAGELQKGNELALPSKYVNFLYLASHYEKLKGSPEDNEQKQLFVEQHKHYLDEIIEQISEFSKRVILADANLDKVLSAYNKHRDKPIREQAENIIHLFTLTNLGAPAAFKYFDTTIDRKRYTSTKEVLDATLIHQSITGLYETRIDLSQLGGDGGGGGPAPGSSGGLLGRDLLTKLKAQIQFSTEGPQVTWEDRPAMCLVLNLEEEYRLHEKPVPPSIDPSWLQLFPMVWAEKAGMGLANQVPPVVVELKSDASPVAVRQYPMSKEAREGIRPHIQRFLDLGILVPCQSPWNTPLLPVKKPGTNDYRPVQDLREVNKRVQDIHPTVPNPYNLLSSLPPSHTWYSVLDLKDAFFCLKLHPNSQPLFAFEWRDPEKGNTGQLTWTRLPQGFKNSPTLFNEALHRDLASFRALNPQVVMLQYVDDLLVAAPTYRDCKEGTRRLLQELSKLGYRVSAKKAQLCREEVTYLGYLLKGGKRWLTPARKATVMKIPTPTTPRQVREFLGKAGFCRLFIPGFASLAAPLYPLTRPKVPFTWTEAHQEAFGRIKEALLSAPALALPDLTKPFALYVDEKEGVARGVLTQTLGPWRRPVAYLSKKLDPVASGWPTCLKAIAAVALLLKDADKLTLGQNVLVIAPHNLESIVRQPPDRWMTNARMTHYQSLLLNERVSFAPPAILNPATLLPVESDDTPIHICSEILAEETGTRPDLRDQPLPGVPAWYTDGSSFIMDGRRQAGAAIVDNKRTVWASNLPEGTSAQKAELIALTQALRLAEGKSINIYTDSRYAFATAHVHGAIYKQRGWLTSAGKDIKNKEEILALLEAIHLPKRVAIIHCPGHQRGTDPVATGNRKADEAAKQAAQSTRILTETTKNAGKRTADGSEFEKRTADGSEFESPKKKAKVE

SEQ ID NO: 7370 - protein, 2216 aa, synthetic construct
MPAAKRVKLDGGDKKYSIGLDIGTNSVGWAVITDEYKVPSKKFKVLGNTDRHSIKKNLIGALLFDSGETAEATRLKRTARRRYTRRKNRICYLQEIFSNEMAKVDDSFFHRLEESFLVEEDKKHERHPIFGNIVDEVAYHEKYPTIYHLRKKLVDSTDKADLRLIYLALAHMIKFRGHFLIEGDLNPDNSDVDKLFIQLVQTYNQLFEENPINASGVDAKAILSARLSKSRRLENLIAQLPGEKKNGLFGNLIALSLGLTPNFKSNFDLAEDAKLQLSKDTYDDDLDNLLAQIGDQYADLFLAAKNLSDAILLSDILRVNTEITKAPLSASMIKRYDEHHQDLTLLKALVRQQLPEKYKEIFFDQSKNGYAGYIDGGASQEEFYKFIKPILEKMDGTEELLVKLNREDLLRKQRTFDNGSIPHQIHLGELHAILRRQEDFYPFLKDNREKIEKILTFRIPYYVGPLARGNSRFAWMTRKSEETITPWNFEEVVDKGASAQSFIERMTNFDKNLPNEKVLPKHSLLYEYFTVYNELTKVKYVTEGMRKPAFLSGEQKKAIVDLLFKTNRKVTVKQLKEDYFKKIECFDSVEISGVEDRFNASLGTYHDLLKIIKDKDFLDNEENEDILEDIVLTLTLFEDREMIEERLKTYAHLFDDKVMKQLKRRRYTGWGRLSRKLINGIRDKQSGKTILDFLKSDGFANRNFMQLIHDDSLTFKEDIQKAQVSGQGDSLHEHIANLAGSPAIKKGILQTVKVVDELVKVMGRHKPENIVIEMARENQTTQKGQKNSRERMKRIEEGIKELGSQILKEHPVENTQLQNEKLYLYYLQNGRDMYVDQELDINRLSDYDVDHIVPQSFLKDDSIDNKVLTRSDKARGKSDNVPSEEVVKKMKNYWRQLLNAKLITQRKFDNLTKAERGGLSELDKAGFIKRQLVETRQITKHVAQILDSRMNTKYDENDKLIREVKVITLKSKLVSDFRKDFQFYKVREINNYHHAHDAYLNAVVGTALIKKYPKLESEFVYGDYKVYDVRKMIAKSEQEIGKATAKYFFYSNIMNFFKTEITLANGEIRKRPLIETNGETGEIVWDKGRDFATVRKVLSMPQVNIVKKTEVQTGGFSKESILPKRNSDKLIARKKDWDPKKYGGFDSPTVAYSVLVVAKVEKGKSKKLKSVKELLGITIMERSSFEKNPIDFLEAKGYKEVKKDLIIKLPKYSLFELENGRKRMLASAGELQKGNELALPSKYVNFLYLASHYEKLKGSPEDNEQKQLFVEQHKHYLDEIIEQISEFSKRVILADANLDKVLSAYNKHRDKPIREQAENIIHLFTLTNLGAPAAFKYFDTTIDRKRYTSTKEVLDATLIHQSITGLYETRIDLSQLGGDGGGGGPAPGSSGGTLGDQGSRGSDPLPEPRVTLTVEGIPTEFLVNTGAEHSVLTKPMGKMGSKRTVVAGATGSKVYPWTTKRLLKIGQKQVTHSFLVIPECPAPLLGRDLLTKLKAQIQFSTEGPQVTWEDRPAMCLVLNLEEEYRLHEKPVPPSIDPSWLQLFPMVWAEKAGMGLANQVPPVVVELKSDASPVAVRQYPMSKEAREGIRPHIQRFLDLGILVPCQSPWNTPLLPVKKPGTNDYRPVQDLREVNKRVQDIHPTVPNPYNLLSSLPPSHTWYSVLDLKDAFFCLKLHPNSQPLFAFEWRDPEKGNTGQLTWTRLPQGFKNSPTLFNEALHRDLASFRALNPQVVMLQYVDDLLVAAPTYRDCKEGTRRLLQELSKLGYRVSAKKAQLCREEVTYLGYLLKGGKRWLTPARKATVMKIPTPTTPRQVREFLGTAGFCRLWIPGFASLAAPLYPLTRPKVPFTWTEAHQEAFGRIKEALLSAPALALPDLTKPFALYVDEKEGVARGVLTQTLGPWRRPVAYLSKKLDPVASGWPTCLKAIAAVALLLKDADKLTLGQNVLVIAPHNLESIVRQPPDRWMTNARMTHYQSLLLNERVSFAPPAILNPATLLPVESDDTPIHICSEILAEETGTRPDLRDQPLPGVPAWYTDGSSFIMDGRRQAGAAIVDNKRTVWASNLPEGTSAQKAELIALTQALRLAEGKSINIYTDSRYAFATAHVHGAIYKQRGWLTSAGKDIKNKEEILALLEAIHLPKRVAIIHCPGHQRGTDPVATGNRKADEAAKQAAQSTRILTETTKNAGKRTADGSEFEKRTADGSEFESPKKKAKVE

SEQ ID NO: 7371 - protein, 2216 aa, synthetic construct
MPAAKRVKLDGGDKKYSIGLDIGTNSVGWAVITDEYKVPSKKFKVLGNTDRHSIKKNLIGALLFDSGETAEATRLKRTARRRYTRRKNRICYLQEIFSNEMAKVDDSFFHRLEESFLVEEDKKHERHPIFGNIVDEVAYHEKYPTIYHLRKKLVDSTDKADLRLIYLALAHMIKFRGHFLIEGDLNPDNSDVDKLFIQLVQTYNQLFEENPINASGVDAKAILSARLSKSRRLENLIAQLPGEKKNGLFGNLIALSLGLTPNFKSNFDLAEDAKLQLSKDTYDDDLDNLLAQIGDQYADLFLAAKNLSDAILLSDILRVNTEITKAPLSASMIKRYDEHHQDLTLLKALVRQQLPEKYKEIFFDQSKNGYAGYIDGGASQEEFYKFIKPILEKMDGTEELLVKLNREDLLRKQRTFDNGSIPHQIHLGELHAILRRQEDFYPFLKDNREKIEKILTFRIPYYVGPLARGNSRFAWMTRKSEETITPWNFEEVVDKGASAQSFIERMTNFDKNLPNEKVLPKHSLLYEYFTVYNELTKVKYVTEGMRKPAFLSGEQKKAIVDLLFKTNRKVTVKQLKEDYFKKIECFDSVEISGVEDRFNASLGTYHDLLKIIKDKDFLDNEENEDILEDIVLTLTLFEDREMIEERLKTYAHLFDDKVMKQLKRRRYTGWGRLSRKLINGIRDKQSGKTILDFLKSDGFANRNFMQLIHDDSLTFKEDIQKAQVSGQGDSLHEHIANLAGSPAIKKGILQTVKVVDELVKVMGRHKPENIVIEMARENQTTQKGQKNSRERMKRIEEGIKELGSQILKEHPVENTQLQNEKLYLYYLQNGRDMYVDQELDINRLSDYDVDHIVPQSFLKDDSIDNKVLTRSDKARGKSDNVPSEEVVKKMKNYWRQLLNAKLITQRKFDNLTKAERGGLSELDKAGFIKRQLVETRQITKHVAQILDSRMNTKYDENDKLIREVKVITLKSKLVSDFRKDFQFYKVREINNYHHAHDAYLNAVVGTALIKKYPKLESEFVYGDYKVYDVRKMIAKSEQEIGKATAKYFFYSNIMNFFKTEITLANGEIRKRPLIETNGETGEIVWDKGRDFATVRKVLSMPQVNIVKKTEVQTGGFSKESILPKRNSDKLIARKKDWDPKKYGGFDSPTVAYSVLVVAKVEKGKSKKLKSVKELLGITIMERSSFEKNPIDFLEAKGYKEVKKDLIIKLPKYSLFELENGRKRMLASAGELQKGNELALPSKYVNFLYLASHYEKLKGSPEDNEQKQLFVEQHKHYLDEIIEQISEFSKRVILADANLDKVLSAYNKHRDKPIREQAENIIHLFTLTNLGAPAAFKYFDTTIDRKRYTSTKEVLDATLIHQSITGLYETRIDLSQLGGDGGGGGPAPGSSGGTLGDQGSRGSDPLPEPRVTLTVEGIPTEFLVNTGAEHSVLTKPMGKMGSKRTVVAGATGSKVYPWTTKRLLKIGQKQVTHSFLVIPECPAPLLGRDLLTKLKAQIQFSTEGPQVTWEDRPAMCLVLNLEEEYRLHEKPVPPSIDPSWLQLFPMVWAEKAGMGLANQVPPVVVELKSDASPVAVRQYPMSKEAREGIRPHIQRFLDLGILVPCQSPWNTPLLPVKKPGTNDYRPVQDLREVNKRVQDIHPTVPNPYNLLSSLPPSHTWYSVLDLKDAFFCLKLHPNSQPLFAFEWRDPEKGNTGQLTWTRLPQGFKNSPTLFNEALHRDLASFRALNPQVVMLQYVDDLLVAAPTYRDCKEGTRRLLQELSKLGYRVSAKKAQLCREEVTYLGYLLKGGKRWLTPARKATVMKIPTPTTPRQVREFLGKAGFCRLFIPGFASLAAPLYPLTRPKVPFTWTEAHQEAFGRIKEALLSAPALALPDLTKPFALYVDEKEGVARGVLTQTLGPWRRPVAYLSKKLDPVASGWPTCLKAIAAVALLLKDADKLTLGQNVLVIAPHNLESIVRQPPDRWMTNARMTHYQSLLLNERVSFAPPAILNPATLLPVESDDTPIHICSEILAEETGTRPDLRDQPLPGVPAWYTDGSSFIMDGRRQAGAAIVDNKRTVWASNLPEGTSAQKAELIALTQALRLAEGKSINIYTDSRYAFATAHVHGAIYKQRGWLTSAGKDIKNKEEILALLEAIHLPKRVAIIHCPGHQRGTDPVATGNRKADEAAKQAAQSTRILTETTKNAGKRTADGSEFEKRTADGSEFESPKKKAKVE

SEQ ID NO: 7372 - protein, 2094 aa, synthetic construct
MPAAKRVKLDGGDKKYSIGLDIGTNSVGWAVITDEYKVPSKKFKVLGNTDRHSIKKNLIGALLFDSGETAEATRLKRTARRRYTRRKNRICYLQEIFSNEMAKVDDSFFHRLEESFLVEEDKKHERHPIFGNIVDEVAYHEKYPTIYHLRKKLVDSTDKADLRLIYLALAHMIKFRGHFLIEGDLNPDNSDVDKLFIQLVQTYNQLFEENPINASGVDAKAILSARLSKSRRLENLIAQLPGEKKNGLFGNLIALSLGLTPNFKSNFDLAEDAKLQLSKDTYDDDLDNLLAQIGDQYADLFLAAKNLSDAILLSDILRVNTEITKAPLSASMIKRYDEHHQDLTLLKALVRQQLPEKYKEIFFDQSKNGYAGYIDGGASQEEFYKFIKPILEKMDGTEELLVKLNREDLLRKQRTFDNGSIPHQIHLGELHAILRRQEDFYPFLKDNREKIEKILTFRIPYYVGPLARGNSRFAWMTRKSEETITPWNFEEVVDKGASAQSFIERMTNFDKNLPNEKVLPKHSLLYEYFTVYNELTKVKYVTEGMRKPAFLSGEQKKAIVDLLFKTNRKVTVKQLKEDYFKKIECFDSVEISGVEDRFNASLGTYHDLLKIIKDKDFLDNEENEDILEDIVLTLTLFEDREMIEERLKTYAHLFDDKVMKQLKRRRYTGWGRLSRKLINGIRDKQSGKTILDFLKSDGFANRNFMQLIHDDSLTFKEDIQKAQVSGQGDSLHEHIANLAGSPAIKKGILQTVKVVDELVKVMGRHKPENIVIEMARENQTTQKGQKNSRERMKRIEEGIKELGSQILKEHPVENTQLQNEKLYLYYLQNGRDMYVDQELDINRLSDYDVDHIVPQSFLKDDSIDNKVLTRSDKARGKSDNVPSEEVVKKMKNYWRQLLNAKLITQRKFDNLTKAERGGLSELDKAGFIKRQLVETRQITKHVAQILDSRMNTKYDENDKLIREVKVITLKSKLVSDFRKDFQFYKVREINNYHHAHDAYLNAVVGTALIKKYPKLESEFVYGDYKVYDVRKMIAKSEQEIGKATAKYFFYSNIMNFFKTEITLANGEIRKRPLIETNGETGEIVWDKGRDFATVRKVLSMPQVNIVKKTEVQTGGFSKESILPKRNSDKLIARKKDWDPKKYGGFDSPTVAYSVLVVAKVEKGKSKKLKSVKELLGITIMERSSFEKNPIDFLEAKGYKEVKKDLIIKLPKYSLFELENGRKRMLASAGELQKGNELALPSKYVNFLYLASHYEKLKGSPEDNEQKQLFVEQHKHYLDEIIEQISEFSKRVILADANLDKVLSAYNKHRDKPIREQAENIIHLFTLTNLGAPAAFKYFDTTIDRKRYTSTKEVLDATLIHQSITGLYETRIDLSQLGGDGGGGGPAPGSSGGTLNIEDEYRLHETSKEPDVSLGSTWLSDFPQAWAETGGMGLAVRQAPLIIPLKATSTPVSIKQYPMSQEARLGIKPHIQRLLDQGILVPCQSPWNTPLLPVKKPGTNDYRPVQDLREVNKRVEDIHPTVPNPYNLLSGLPPSHQWYTVLDLKDAFFCLRLHPTSQPLFAFEWRDPEMGISGQLTWTRLPQGFKNSPTLFNEALHRDLAGFRIQHPDLILLQYVDDLLLAATSELDCQQGTRALLQTLGDLGYRASAKKAQICQKQVKYLGYLLKEGQRWLTEARKETVMGQPIPKTPRQLREFLGKAGFCRLFIPGFAEMAAPLYPLTKPGTLFNWGPDQQKAFQEIKQALLTAPALGLPDLTKPFELFVDEKQGYAKGVLTQKLGPWRRPVAYLSKKLDPVAAGWPPCLRMVAAIAVLTKDAGKLTMGQPLVILAPHAVEALVKQPPDRWLSNARMTHYQALLLDTDRVQFGPVVALNPATLLPLPEEGLQHDCLDILAEAHGTRSDLMDQPLPDADHTWYTDGSSFLQEGQRKAGAAVTTETEVIWARALPAGTSAQRAELIALTQALKMAEGKKLNVYTDSRYAFATAHIHGEIYRRRGWLTSEGKEIKNKDEILALLKALFLPKRLSIIHCPGHQKGNSAEARGNRMADQAAREVATRETPETSTLLAGKRTADGSEFEKRTADGSEFESPKKKAKVE

SEQ ID NO: 7373 - protein, 2094 aa, synthetic construct
MPAAKRVKLDGGDKKYSIGLDIGTNSVGWAVITDEYKVPSKKFKVLGNTDRHSIKKNLIGALLFDSGETAEATRLKRTARRRYTRRKNRICYLQEIFSNEMAKVDDSFFHRLEESFLVEEDKKHERHPIFGNIVDEVAYHEKYPTIYHLRKKLVDSTDKADLRLIYLALAHMIKFRGHFLIEGDLNPDNSDVDKLFIQLVQTYNQLFEENPINASGVDAKAILSARLSKSRRLENLIAQLPGEKKNGLFGNLIALSLGLTPNFKSNFDLAEDAKLQLSKDTYDDDLDNLLAQIGDQYADLFLAAKNLSDAILLSDILRVNTEITKAPLSASMIKRYDEHHQDLTLLKALVRQQLPEKYKEIFFDQSKNGYAGYIDGGASQEEFYKFIKPILEKMDGTEELLVKLNREDLLRKQRTFDNGSIPHQIHLGELHAILRRQEDFYPFLKDNREKIEKILTFRIPYYVGPLARGNSRFAWMTRKSEETITPWNFEEVVDKGASAQSFIERMTNFDKNLPNEKVLPKHSLLYEYFTVYNELTKVKYVTEGMRKPAFLSGEQKKAIVDLLFKTNRKVTVKQLKEDYFKKIECFDSVEISGVEDRFNASLGTYHDLLKIIKDKDFLDNEENEDILEDIVLTLTLFEDREMIEERLKTYAHLFDDKVMKQLKRRRYTGWGRLSRKLINGIRDKQSGKTILDFLKSDGFANRNFMQLIHDDSLTFKEDIQKAQVSGQGDSLHEHIANLAGSPAIKKGILQTVKVVDELVKVMGRHKPENIVIEMARENQTTQKGQKNSRERMKRIEEGIKELGSQILKEHPVENTQLQNEKLYLYYLQNGRDMYVDQELDINRLSDYDVDHIVPQSFLKDDSIDNKVLTRSDKARGKSDNVPSEEVVKKMKNYWRQLLNAKLITQRKFDNLTKAERGGLSELDKAGFIKRQLVETRQITKHVAQILDSRMNTKYDENDKLIREVKVITLKSKLVSDFRKDFQFYKVREINNYHHAHDAYLNAVVGTALIKKYPKLESEFVYGDYKVYDVRKMIAKSEQEIGKATAKYFFYSNIMNFFKTEITLANGEIRKRPLIETNGETGEIVWDKGRDFATVRKVLSMPQVNIVKKTEVQTGGFSKESILPKRNSDKLIARKKDWDPKKYGGFDSPTVAYSVLVVAKVEKGKSKKLKSVKELLGITIMERSSFEKNPIDFLEAKGYKEVKKDLIIKLPKYSLFELENGRKRMLASAGELQKGNELALPSKYVNFLYLASHYEKLKGSPEDNEQKQLFVEQHKHYLDEIIEQISEFSKRVILADANLDKVLSAYNKHRDKPIREQAENIIHLFTLTNLGAPAAFKYFDTTIDRKRYTSTKEVLDATLIHQSITGLYETRIDLSQLGGDGGGGGPAPGSSGGTLNIEDEYRLHETSKGPDVPLGSTWLSDFPQAWAETGGMGLAFRQAPLIISLKATSTPVSIKQYPMSQEARLGIKPHIQRLLDQGILVPCQSPWNTPLLPVKKPGTNDYRPVQDLREVNKRVEDIHPTVPNPYNLLSGLPPSHQWYTVLDLKDAFFCLRLHPTSQSLFAFEWKDPEMGISGQLTWTRLPQGFKNSPTLFNEALHRDLADFRIQHPDLILLQYVDDLLLAATSELDCQQGTRALLQTLGDLGYRASAKKAQICQKQVKYLGYLLKEGQRWLTEARKETVMGQPTPKTPRQLREFLGKAGLCRLFIPGFAEMAAPLYPLTKPGTLFKWGPDQQKAYQEIKQALLTAPALGLPDLTKPFELFVDEKQGYAKGVLTQKLGPWRRPVAYLSKKLDPVAAGWPPCLRMVAAIAVLTKDVGKLTMGQPLVILAPHAVEALVKQPPDRWLSNARMTHYQALLLDTDRVQFGPIVALNPATLLPLPEEGLQHDCLDILAEAHGTRPDLTDQPLPDADHTWYTDGSSFLQEGQRRAGAAVTTETEVIWAKALPAGTSAQRAELIALTQALKMAAGKKLNVYTDSRYAFATAHIHGEIYRRRGWLTSEGKEIKNKDEILALLKALFLPKRLSIIHCPGHQKGNHAEARGNRMADQAAREVATRETPETSTLLAGKRTADGSEFEKRTADGSEFESPKKKAKVE

SEQ ID NO: 7374 - protein, 2094 aa, synthetic construct
MPAAKRVKLDGGDKKYSIGLDIGTNSVGWAVITDEYKVPSKKFKVLGNTDRHSIKKNLIGALLFDSGETAEATRLKRTARRRYTRRKNRICYLQEIFSNEMAKVDDSFFHRLEESFLVEEDKKHERHPIFGNIVDEVAYHEKYPTIYHLRKKLVDSTDKADLRLIYLALAHMIKFRGHFLIEGDLNPDNSDVDKLFIQLVQTYNQLFEENPINASGVDAKAILSARLSKSRRLENLIAQLPGEKKNGLFGNLIALSLGLTPNFKSNFDLAEDAKLQLSKDTYDDDLDNLLAQIGDQYADLFLAAKNLSDAILLSDILRVNTEITKAPLSASMIKRYDEHHQDLTLLKALVRQQLPEKYKEIFFDQSKNGYAGYIDGGASQEEFYKFIKPILEKMDGTEELLVKLNREDLLRKQRTFDNGSIPHQIHLGELHAILRRQEDFYPFLKDNREKIEKILTFRIPYYVGPLARGNSRFAWMTRKSEETITPWNFEEVVDKGASAQSFIERMTNFDKNLPNEKVLPKHSLLYEYFTVYNELTKVKYVTEGMRKPAFLSGEQKKAIVDLLFKTNRKVTVKQLKEDYFKKIECFDSVEISGVEDRFNASLGTYHDLLKIIKDKDFLDNEENEDILEDIVLTLTLFEDREMIEERLKTYAHLFDDKVMKQLKRRRYTGWGRLSRKLINGIRDKQSGKTILDFLKSDGFANRNFMQLIHDDSLTFKEDIQKAQVSGQGDSLHEHIANLAGSPAIKKGILQTVKVVDELVKVMGRHKPENIVIEMARENQTTQKGQKNSRERMKRIEEGIKELGSQILKEHPVENTQLQNEKLYLYYLQNGRDMYVDQELDINRLSDYDVDHIVPQSFLKDDSIDNKVLTRSDKARGKSDNVPSEEVVKKMKNYWRQLLNAKLITQRKFDNLTKAERGGLSELDKAGFIKRQLVETRQITKHVAQILDSRMNTKYDENDKLIREVKVITLKSKLVSDFRKDFQFYKVREINNYHHAHDAYLNAVVGTALIKKYPKLESEFVYGDYKVYDVRKMIAKSEQEIGKATAKYFFYSNIMNFFKTEITLANGEIRKRPLIETNGETGEIVWDKGRDFATVRKVLSMPQVNIVKKTEVQTGGFSKESILPKRNSDKLIARKKDWDPKKYGGFDSPTVAYSVLVVAKVEKGKSKKLKSVKELLGITIMERSSFEKNPIDFLEAKGYKEVKKDLIIKLPKYSLFELENGRKRMLASAGELQKGNELALPSKYVNFLYLASHYEKLKGSPEDNEQKQLFVEQHKHYLDEIIEQISEFSKRVILADANLDKVLSAYNKHRDKPIREQAENIIHLFTLTNLGAPAAFKYFDTTIDRKRYTSTKEVLDATLIHQSITGLYETRIDLSQLGGDGGGGGPAPGSSGGTLNIEDEYRLHETSKGPDVPLGSTWLSDFPQAWAETGGMGLAVRQAPLIIPLKATSTPVSIKQYPMSQEARLGIKPHIQRLLDQGILVPCQSPWNTPLLPVKKPGTNDYRPVQDLREVNKRVEDIHPTVPNPYNLLSGLPPSHQWYTVLDLKDAFFCLRLHPTSQSLFAFEWRDPEMGISGQLTWTRLPQGFKNSPTLFNEALHRDLADFRIQHPDLILLQYVDDLLLAATSELDCQQGTRALLQTLGDLGYRASAKKAQICQKQVKYLGYLLKEGQRWLTEARKETVMGQPTPKTPRQLREFLGTAGFCRLWIPGFAEMAAPLYPLTKPGTLFEWGPDQQKAYQEIKQALLTAPALGLPDLTKPFELFVDEKQGYAKGVLTQKLGPWRRPVAYLSKKLDPVAAGWPPCLRMVAAIAVLTKDAGKLTMGQPLVILAPHAVEALVKQPPDRWLSNARMTHYQALLLDTDRVQFGPIVALNPATLLPLPEEGLQHDCLDILAEAHGTRPDLTDQPLPDADHTWYTDGSSFLQEGQRKAGAAVTTETEVVWAKALPAGTSAQRAELIALTQALKMAEGKKLNVYTDSRYAFATAHIHGEIYRRRGWLTSEGKEIKNKDEILALLKALFLPKRLSIIHCPGHQKGNRAEARGNRMADQAAREVATRETPETSTLLAGKRTADGSEFEKRTADGSEFESPKKKAKVE

SEQ ID NO: 7375 - protein, 2094 aa, synthetic construct
MPAAKRVKLDGGDKKYSIGLDIGTNSVGWAVITDEYKVPSKKFKVLGNTDRHSIKKNLIGALLFDSGETAEATRLKRTARRRYTRRKNRICYLQEIFSNEMAKVDDSFFHRLEESFLVEEDKKHERHPIFGNIVDEVAYHEKYPTIYHLRKKLVDSTDKADLRLIYLALAHMIKFRGHFLIEGDLNPDNSDVDKLFIQLVQTYNQLFEENPINASGVDAKAILSARLSKSRRLENLIAQLPGEKKNGLFGNLIALSLGLTPNFKSNFDLAEDAKLQLSKDTYDDDLDNLLAQIGDQYADLFLAAKNLSDAILLSDILRVNTEITKAPLSASMIKRYDEHHQDLTLLKALVRQQLPEKYKEIFFDQSKNGYAGYIDGGASQEEFYKFIKPILEKMDGTEELLVKLNREDLLRKQRTFDNGSIPHQIHLGELHAILRRQEDFYPFLKDNREKIEKILTFRIPYYVGPLARGNSRFAWMTRKSEETITPWNFEEVVDKGASAQSFIERMTNFDKNLPNEKVLPKHSLLYEYFTVYNELTKVKYVTEGMRKPAFLSGEQKKAIVDLLFKTNRKVTVKQLKEDYFKKIECFDSVEISGVEDRFNASLGTYHDLLKIIKDKDFLDNEENEDILEDIVLTLTLFEDREMIEERLKTYAHLFDDKVMKQLKRRRYTGWGRLSRKLINGIRDKQSGKTILDFLKSDGFANRNFMQLIHDDSLTFKEDIQKAQVSGQGDSLHEHIANLAGSPAIKKGILQTVKVVDELVKVMGRHKPENIVIEMARENQTTQKGQKNSRERMKRIEEGIKELGSQILKEHPVENTQLQNEKLYLYYLQNGRDMYVDQELDINRLSDYDVDHIVPQSFLKDDSIDNKVLTRSDKARGKSDNVPSEEVVKKMKNYWRQLLNAKLITQRKFDNLTKAERGGLSELDKAGFIKRQLVETRQITKHVAQILDSRMNTKYDENDKLIREVKVITLKSKLVSDFRKDFQFYKVREINNYHHAHDAYLNAVVGTALIKKYPKLESEFVYGDYKVYDVRKMIAKSEQEIGKATAKYFFYSNIMNFFKTEITLANGEIRKRPLIETNGETGEIVWDKGRDFATVRKVLSMPQVNIVKKTEVQTGGFSKESILPKRNSDKLIARKKDWDPKKYGGFDSPTVAYSVLVVAKVEKGKSKKLKSVKELLGITIMERSSFEKNPIDFLEAKGYKEVKKDLIIKLPKYSLFELENGRKRMLASAGELQKGNELALPSKYVNFLYLASHYEKLKGSPEDNEQKQLFVEQHKHYLDEIIEQISEFSKRVILADANLDKVLSAYNKHRDKPIREQAENIIHLFTLTNLGAPAAFKYFDTTIDRKRYTSTKEVLDATLIHQSITGLYETRIDLSQLGGDGGGGGPAPGSSGGTLNIEDEYRLHEISTEPDVSPGSTWLSDFPQAWAETGGMGLAVRQAPLIIPLKATSTPVSIKQYPMSQEAKLGIKPHIQRLLDQGILVPCQSPWNTPLLPVKKPGTNDYRPVQGLREVNKRVEDIHPTVPNPYNLLSGLPTSHRWYTVLDLKDAFFCLRLHPTSQPLFASEWRDPGMGISGQLTWTRLPQGFKNSPTLFDEALHRGLADFRIQHPDLILLQYVDDLLLAATSELDCQQGTRALLKTLGNLGYRASAKKAQICQKQVKYLGYLLREGQRWLTEARKETVMGQPTPKTPRQLREFLGTAGFCRLWIPRFAEMAAPLYPLTKTGTLFNWGPDQQKAYHEIKQALLTAPALGLPDLTKPFELFVDEKQGYAKGVLTQKLGPWRRPVAYLSKKLDPVAAGWPPCLRMVAAIAVLTKDAGKLTMGQPLVILAPHAVEALVKQPPDRWLSNARMTHYQAMLLDTDRVQFGPVVALNPATLLPLPEEGAPHDCLEILAETHGTEPDLTDQPIPDADHTWYTDGSSFLQEGQRKAGAAVTTETEVIWARALPAGTSAQRAELIALTQALKMAEGKRLNVYTDSRYAFATAHIHGEIYKRRGLLTSEGREIKNKSEILALLKALFLPKRLSIIHCLGHQKGDSAEARGNRLADQAAREAAIKTPPDTSTLLAGKRTADGSEFEKRTADGSEFESPKKKAKVE

SEQ ID NO: 7376 - protein, 2114 aa, synthetic construct
MPAAKRVKLDGGDKKYSIGLDIGTNSVGWAVITDEYKVPSKKFKVLGNTDRHSIKKNLIGALLFDSGETAEATRLKRTARRRYTRRKNRICYLQEIFSNEMAKVDDSFFHRLEESFLVEEDKKHERHPIFGNIVDEVAYHEKYPTIYHLRKKLVDSTDKADLRLIYLALAHMIKFRGHFLIEGDLNPDNSDVDKLFIQLVQTYNQLFEENPINASGVDAKAILSARLSKSRRLENLIAQLPGEKKNGLFGNLIALSLGLTPNFKSNFDLAEDAKLQLSKDTYDDDLDNLLAQIGDQYADLFLAAKNLSDAILLSDILRVNTEITKAPLSASMIKRYDEHHQDLTLLKALVRQQLPEKYKEIFFDQSKNGYAGYIDGGASQEEFYKFIKPILEKMDGTEELLVKLNREDLLRKQRTFDNGSIPHQIHLGELHAILRRQEDFYPFLKDNREKIEKILTFRIPYYVGPLARGNSRFAWMTRKSEETITPWNFEEVVDKGASAQSFIERMTNFDKNLPNEKVLPKHSLLYEYFTVYNELTKVKYVTEGMRKPAFLSGEQKKAIVDLLFKTNRKVTVKQLKEDYFKKIECFDSVEISGVEDRFNASLGTYHDLLKIIKDKDFLDNEENEDILEDIVLTLTLFEDREMIEERLKTYAHLFDDKVMKQLKRRRYTGWGRLSRKLINGIRDKQSGKTILDFLKSDGFANRNFMQLIHDDSLTFKEDIQKAQVSGQGDSLHEHIANLAGSPAIKKGILQTVKVVDELVKVMGRHKPENIVIEMARENQTTQKGQKNSRERMKRIEEGIKELGSQILKEHPVENTQLQNEKLYLYYLQNGRDMYVDQELDINRLSDYDVDHIVPQSFLKDDSIDNKVLTRSDKARGKSDNVPSEEVVKKMKNYWRQLLNAKLITQRKFDNLTKAERGGLSELDKAGFIKRQLVETRQITKHVAQILDSRMNTKYDENDKLIREVKVITLKSKLVSDFRKDFQFYKVREINNYHHAHDAYLNAVVGTALIKKYPKLESEFVYGDYKVYDVRKMIAKSEQEIGKATAKYFFYSNIMNFFKTEITLANGEIRKRPLIETNGETGEIVWDKGRDFATVRKVLSMPQVNIVKKTEVQTGGFSKESILPKRNSDKLIARKKDWDPKKYGGFDSPTVAYSVLVVAKVEKGKSKKLKSVKELLGITIMERSSFEKNPIDFLEAKGYKEVKKDLIIKLPKYSLFELENGRKRMLASAGELQKGNELALPSKYVNFLYLASHYEKLKGSPEDNEQKQLFVEQHKHYLDEIIEQISEFSKRVILADANLDKVLSAYNKHRDKPIREQAENIIHLFTLTNLGAPAAFKYFDTTIDRKRYTSTKEVLDATLIHQSITGLYETRIDLSQLGGDGGGGGPAPGSSGGWVQEISDSRPMLHIYLNGRRFLGLLNTGADKTCIAGRDWPANWPIHQTESSLQGLGMACGVARSSQPLRWQHEDKSGIIHPFVIPTLPFTLWGRDIMKDIKVRLMTDSPDDSQDLMIGAIESNLFADQISWKSDQPVWLNQWPLKQEKLQALQQLVTEQLQLGHLEESNSPWNTPVFVIKKKSGKWRLLQDLRAVNATMHDMGALQPGLPSPVAPPKGWEIIIIDLQDCFFNIKLHPEDCKRFAFSVPSPNFKRPYQRFQWKVLPQGMKNSPTLCQKFVDKAILTVRDKYQDSYIVHYMDDILLAHPSRSIVDEILTSMIQALNKHGLVVSTEKIQKYDNLKYLGTHIQGDSVSYQKLQIRTDKLRTLNDFQKLLGNINWIRPFLKLTTGELKPLFEILNPDSNPISTRKLTPEACKALQLMNERLSTARVKRLDLSQPWSLCILKTEYTPTACLWQDGVVEWIHLPHISPKVITPYDIFCTQLIIKGRHRSKELFSKDPDYIVVPYTKVQFDLLLQEKEDWPISLLGFLGEVHFHLPKDPLLTFTLQTAIIFPHMTSTTPLEKGIVIFTDGSANGRSVTYIQGREPIIKENTQNTAQQAEIVAVITAFEEVSQPFNLYTDSKYVTGLFPEIETATLSPRTKIYTELKHLQRLIHKRQEKFYIGHIRGHTGLPGPLAQGNAYADSLTRILTAGKRTADGSEFEKRTADGSEFESPKKKAKVE

SEQ ID NO: 7377 - protein, 2085 aa, synthetic construct
MPAAKRVKLDGGDKKYSIGLDIGTNSVGWAVITDEYKVPSKKFKVLGNTDRHSIKKNLIGALLFDSGETAEATRLKRTARRRYTRRKNRICYLQEIFSNEMAKVDDSFFHRLEESFLVEEDKKHERHPIFGNIVDEVAYHEKYPTIYHLRKKLVDSTDKADLRLIYLALAHMIKFRGHFLIEGDLNPDNSDVDKLFIQLVQTYNQLFEENPINASGVDAKAILSARLSKSRRLENLIAQLPGEKKNGLFGNLIALSLGLTPNFKSNFDLAEDAKLQLSKDTYDDDLDNLLAQIGDQYADLFLAAKNLSDAILLSDILRVNTEITKAPLSASMIKRYDEHHQDLTLLKALVRQQLPEKYKEIFFDQSKNGYAGYIDGGASQEEFYKFIKPILEKMDGTEELLVKLNREDLLRKQRTFDNGSIPHQIHLGELHAILRRQEDFYPFLKDNREKIEKILTFRIPYYVGPLARGNSRFAWMTRKSEETITPWNFEEVVDKGASAQSFIERMTNFDKNLPNEKVLPKHSLLYEYFTVYNELTKVKYVTEGMRKPAFLSGEQKKAIVDLLFKTNRKVTVKQLKEDYFKKIECFDSVEISGVEDRFNASLGTYHDLLKIIKDKDFLDNEENEDILEDIVLTLTLFEDREMIEERLKTYAHLFDDKVMKQLKRRRYTGWGRLSRKLINGIRDKQSGKTILDFLKSDGFANRNFMQLIHDDSLTFKEDIQKAQVSGQGDSLHEHIANLAGSPAIKKGILQTVKVVDELVKVMGRHKPENIVIEMARENQTTQKGQKNSRERMKRIEEGIKELGSQILKEHPVENTQLQNEKLYLYYLQNGRDMYVDQELDINRLSDYDVDHIVPQSFLKDDSIDNKVLTRSDKARGKSDNVPSEEVVKKMKNYWRQLLNAKLITQRKFDNLTKAERGGLSELDKAGFIKRQLVETRQITKHVAQILDSRMNTKYDENDKLIREVKVITLKSKLVSDFRKDFQFYKVREINNYHHAHDAYLNAVVGTALIKKYPKLESEFVYGDYKVYDVRKMIAKSEQEIGKATAKYFFYSNIMNFFKTEITLANGEIRKRPLIETNGETGEIVWDKGRDFATVRKVLSMPQVNIVKKTEVQTGGFSKESILPKRNSDKLIARKKDWDPKKYGGFDSPTVAYSVLVVAKVEKGKSKKLKSVKELLGITIMERSSFEKNPIDFLEAKGYKEVKKDLIIKLPKYSLFELENGRKRMLASAGELQKGNELALPSKYVNFLYLASHYEKLKGSPEDNEQKQLFVEQHKHYLDEIIEQISEFSKRVILADANLDKVLSAYNKHRDKPIREQAENIIHLFTLTNLGAPAAFKYFDTTIDRKRYTSTKEVLDATLIHQSITGLYETRIDLSQLGGDGGGGGPAPGSSGGIPWLMKKPLQLTTLVPLQEYEERLLKQTMLTGSYKEKLQSLFLKYDALWQHWENQVGHRRIKPHHIATGTVNPRPQKQYPINPKAKASIQTVINDLLKQGVLIQQNSIMNTPVYPVPKPDGKWRMVLDYREVNKTIPLIAAQNQHSAGILSSIFRGKYKTTLDLSNGFWAHSITPESYWLTAFTWLGQQYCWTRLPQGFLNSPALFNADVVDLLKEVPNVQVYVDDIYISHDDPREHLEQLEKVFSLLLNAGYVVSLKKSEIAQHEVEFLGFNITKEGRGLTETFKQKLLNITPPRDLKQLQSILGLLNFARNFIPNFSELVKPLYNIIATAPGKYITWTTDNSQQLQNIISMLNSAENLEERNPEVRLIMKVNTSPSAGYIRFYNEFAKRPIMYLNYVYTKAEVKFTNTEKLLTTIHKGLIKALDLGMGQEILVYSPIVSMTKIQKTPLPERKALPIRWITWMSYLEDPRIQFHYDKTLPELQQVPTVTDDIIAKIKHPSEFSMVFYTDGSAIKHPNVNKSHNAGMGIAQVQFKPEFTVINTWSIPLGDHTAQLAEVAAVEFACKKALKIDGPVLIVTDSFYVAESVNKELPYWQSNGFFNNKKKPLKHVSKWKSIADCIQLKPDIIIIHEKGHQPTASTFHTEGNNLADKLATQGSYVVNAGKRTADGSEFEKRTADGSEFESPKKKAKVE

SEQ ID NO: 7378 - protein, 2092 aa, synthetic construct
MPAAKRVKLDGGDKKYSIGLDIGTNSVGWAVITDEYKVPSKKFKVLGNTDRHSIKKNLIGALLFDSGETAEATRLKRTARRRYTRRKNRICYLQEIFSNEMAKVDDSFFHRLEESFLVEEDKKHERHPIFGNIVDEVAYHEKYPTIYHLRKKLVDSTDKADLRLIYLALAHMIKFRGHFLIEGDLNPDNSDVDKLFIQLVQTYNQLFEENPINASGVDAKAILSARLSKSRRLENLIAQLPGEKKNGLFGNLIALSLGLTPNFKSNFDLAEDAKLQLSKDTYDDDLDNLLAQIGDQYADLFLAAKNLSDAILLSDILRVNTEITKAPLSASMIKRYDEHHQDLTLLKALVRQQLPEKYKEIFFDQSKNGYAGYIDGGASQEEFYKFIKPILEKMDGTEELLVKLNREDLLRKQRTFDNGSIPHQIHLGELHAILRRQEDFYPFLKDNREKIEKILTFRIPYYVGPLARGNSRFAWMTRKSEETITPWNFEEVVDKGASAQSFIERMTNFDKNLPNEKVLPKHSLLYEYFTVYNELTKVKYVTEGMRKPAFLSGEQKKAIVDLLFKTNRKVTVKQLKEDYFKKIECFDSVEISGVEDRFNASLGTYHDLLKIIKDKDFLDNEENEDILEDIVLTLTLFEDREMIEERLKTYAHLFDDKVMKQLKRRRYTGWGRLSRKLINGIRDKQSGKTILDFLKSDGFANRNFMQLIHDDSLTFKEDIQKAQVSGQGDSLHEHIANLAGSPAIKKGILQTVKVVDELVKVMGRHKPENIVIEMARENQTTQKGQKNSRERMKRIEEGIKELGSQILKEHPVENTQLQNEKLYLYYLQNGRDMYVDQELDINRLSDYDVDHIVPQSFLKDDSIDNKVLTRSDKARGKSDNVPSEEVVKKMKNYWRQLLNAKLITQRKFDNLTKAERGGLSELDKAGFIKRQLVETRQITKHVAQILDSRMNTKYDENDKLIREVKVITLKSKLVSDFRKDFQFYKVREINNYHHAHDAYLNAVVGTALIKKYPKLESEFVYGDYKVYDVRKMIAKSEQEIGKATAKYFFYSNIMNFFKTEITLANGEIRKRPLIETNGETGEIVWDKGRDFATVRKVLSMPQVNIVKKTEVQTGGFSKESILPKRNSDKLIARKKDWDPKKYGGFDSPTVAYSVLVVAKVEKGKSKKLKSVKELLGITIMERSSFEKNPIDFLEAKGYKEVKKDLIIKLPKYSLFELENGRKRMLASAGELQKGNELALPSKYVNFLYLASHYEKLKGSPEDNEQKQLFVEQHKHYLDEIIEQISEFSKRVILADANLDKVLSAYNKHRDKPIREQAENIIHLFTLTNLGAPAAFKYFDTTIDRKRYTSTKEVLDATLIHQSITGLYETRIDLSQLGGDGGGGGPAPGSSGGVLNLEEEYRLHEKPVPSSIDPSWLQLFPTVWAERAGMGLANQVPPVVVELRSGASPVAVRQYPMSKEAREGIRPHIQRFLDLGVLVPCQSPWNTPLLPVKKPGTNDYRPVQDLREINKRVQDIHPTVPNPYNLLSSLPPSHTWYSVLDLKDAFFCLKLHPNSQPLFAFEWRDPEKGNTGQLTWTRLPQGFKNSPTLFNEALHRDLAPFRALNPQVVLLQYVDDLLVAAPTYRDCKEGTQKLLQELSKLGYRVSAKKAQLCQKEVTYLGYLLKEGKRWLTPARKATVMKIPPPTTPRQVREFLGTAGFCRLWIPGFASLAAPLYPLTKPSIPFIWTEEHQKAFDRIKEALLSAPALALPDLTKPFTLYVDERAGVARGVLTQTLGPWRRPVAYLSKKLDPVASGWPTCLKAVAAVALLLKDADKLTLGQNVTVIASHSLESIVRQPPDRWMTNARMTHYQSLLLNERVSFAPPAVLNPATLLPVESEATPVHRCSEILAEETGTRRDLKDQPLPGVPAWYTDGSSFIAEGKRRAGAAIVDGKRTVWASSLPEGTSAQKAELVALTQALRLAEGKDINIYTDSRYAFATAHIHGAIYKQRGWLTSAGKDIKNKEEILALLEAIHLPKRVAIIHCPGHQKGNDPVATGNRRADEAAKQAALSTRVLAETTKPAGKRTADGSEFEKRTADGSEFESPKKKAKVE

SEQ ID NO: 7379 - protein, 2096 aa, synthetic construct
MPAAKRVKLDGGDKKYSIGLDIGTNSVGWAVITDEYKVPSKKFKVLGNTDRHSIKKNLIGALLFDSGETAEATRLKRTARRRYTRRKNRICYLQEIFSNEMAKVDDSFFHRLEESFLVEEDKKHERHPIFGNIVDEVAYHEKYPTIYHLRKKLVDSTDKADLRLIYLALAHMIKFRGHFLIEGDLNPDNSDVDKLFIQLVQTYNQLFEENPINASGVDAKAILSARLSKSRRLENLIAQLPGEKKNGLFGNLIALSLGLTPNFKSNFDLAEDAKLQLSKDTYDDDLDNLLAQIGDQYADLFLAAKNLSDAILLSDILRVNTEITKAPLSASMIKRYDEHHQDLTLLKALVRQQLPEKYKEIFFDQSKNGYAGYIDGGASQEEFYKFIKPILEKMDGTEELLVKLNREDLLRKQRTFDNGSIPHQIHLGELHAILRRQEDFYPFLKDNREKIEKILTFRIPYYVGPLARGNSRFAWMTRKSEETITPWNFEEVVDKGASAQSFIERMTNFDKNLPNEKVLPKHSLLYEYFTVYNELTKVKYVTEGMRKPAFLSGEQKKAIVDLLFKTNRKVTVKQLKEDYFKKIECFDSVEISGVEDRFNASLGTYHDLLKIIKDKDFLDNEENEDILEDIVLTLTLFEDREMIEERLKTYAHLFDDKVMKQLKRRRYTGWGRLSRKLINGIRDKQSGKTILDFLKSDGFANRNFMQLIHDDSLTFKEDIQKAQVSGQGDSLHEHIANLAGSPAIKKGILQTVKVVDELVKVMGRHKPENIVIEMARENQTTQKGQKNSRERMKRIEEGIKELGSQILKEHPVENTQLQNEKLYLYYLQNGRDMYVDQELDINRLSDYDVDHIVPQSFLKDDSIDNKVLTRSDKARGKSDNVPSEEVVKKMKNYWRQLLNAKLITQRKFDNLTKAERGGLSELDKAGFIKRQLVETRQITKHVAQILDSRMNTKYDENDKLIREVKVITLKSKLVSDFRKDFQFYKVREINNYHHAHDAYLNAVVGTALIKKYPKLESEFVYGDYKVYDVRKMIAKSEQEIGKATAKYFFYSNIMNFFKTEITLANGEIRKRPLIETNGETGEIVWDKGRDFATVRKVLSMPQVNIVKKTEVQTGGFSKESILPKRNSDKLIARKKDWDPKKYGGFDSPTVAYSVLVVAKVEKGKSKKLKSVKELLGITIMERSSFEKNPIDFLEAKGYKEVKKDLIIKLPKYSLFELENGRKRMLASAGELQKGNELALPSKYVNFLYLASHYEKLKGSPEDNEQKQLFVEQHKHYLDEIIEQISEFSKRVILADANLDKVLSAYNKHRDKPIREQAENIIHLFTLTNLGAPAAFKYFDTTIDRKRYTSTKEVLDATLIHQSITGLYETRIDLSQLGGDGGGSSGGGPAPGGTAPLEEEYRLFLEAPIQNVTLLEQWKREIPKVWAEINPPGLASTQAPIHVQLLSTALPVRVRQYPITLEAKRSLRETIRKFRAAGILRPVHSPWNTPLLPVRKSGTSEYRMVQDLREVNKRVETIHPTVPNPYTLLSLLPPDRIWYSVLDLKDAFFCIPLAPESQLIFAFEWADAEEGESGQLTWTRLPQGFKNSPTLFDEALNRDLQGFRLDHPSVSLLQYVDDLLIAADTQAACLSATRDLLMTLAELGYRVSGKKAQLCQEEVTYLGFKIHKGSRSLSNSRTQAILQIPVPKTKRQVREFLGTIGYCRLWIPGFAELAQPLYAATRGGNDPLVWGEKEEEAFQSLKLALTQPPALALPSLDKPFQLFVEETSGAAKGVLTQALGPWKRPVAYLSKRLDPVAAGWPRCLRAIAAAALLTREASKLTFGQDIEITSSHNLESLLRSPPDKWLTNARITQYQVLLLDPPRVRFKQTAALNPATLLPETDDTLPIHHCLDTLDSLTSTRPDLTDQPLAQAEATLFTDGSSYIRDGKRYAGAAVVTLDSVIWAEPLPIGTSAQKAELIALTKALEWSKDKSVNIYTDSRYAFATLHVHGMIYRERGLLTAGGKAIKNAPEILALLTAVWLPKRVAVMHCKGHQKDDAPTSTGNRRADEVAREVAIRPLSTQATISAGKRTADGSEFEKRTADGSEFESPKKKAKVE

SEQ ID NO: 7380 - protein, 2096 aa, synthetic construct
MPAAKRVKLDGGDKKYSIGLDIGTNSVGWAVITDEYKVPSKKFKVLGNTDRHSIKKNLIGALLFDSGETAEATRLKRTARRRYTRRKNRICYLQEIFSNEMAKVDDSFFHRLEESFLVEEDKKHERHPIFGNIVDEVAYHEKYPTIYHLRKKLVDSTDKADLRLIYLALAHMIKFRGHFLIEGDLNPDNSDVDKLFIQLVQTYNQLFEENPINASGVDAKAILSARLSKSRRLENLIAQLPGEKKNGLFGNLIALSLGLTPNFKSNFDLAEDAKLQLSKDTYDDDLDNLLAQIGDQYADLFLAAKNLSDAILLSDILRVNTEITKAPLSASMIKRYDEHHQDLTLLKALVRQQLPEKYKEIFFDQSKNGYAGYIDGGASQEEFYKFIKPILEKMDGTEELLVKLNREDLLRKQRTFDNGSIPHQIHLGELHAILRRQEDFYPFLKDNREKIEKILTFRIPYYVGPLARGNSRFAWMTRKSEETITPWNFEEVVDKGASAQSFIERMTNFDKNLPNEKVLPKHSLLYEYFTVYNELTKVKYVTEGMRKPAFLSGEQKKAIVDLLFKTNRKVTVKQLKEDYFKKIECFDSVEISGVEDRFNASLGTYHDLLKIIKDKDFLDNEENEDILEDIVLTLTLFEDREMIEERLKTYAHLFDDKVMKQLKRRRYTGWGRLSRKLINGIRDKQSGKTILDFLKSDGFANRNFMQLIHDDSLTFKEDIQKAQVSGQGDSLHEHIANLAGSPAIKKGILQTVKVVDELVKVMGRHKPENIVIEMARENQTTQKGQKNSRERMKRIEEGIKELGSQILKEHPVENTQLQNEKLYLYYLQNGRDMYVDQELDINRLSDYDVDHIVPQSFLKDDSIDNKVLTRSDKARGKSDNVPSEEVVKKMKNYWRQLLNAKLITQRKFDNLTKAERGGLSELDKAGFIKRQLVETRQITKHVAQILDSRMNTKYDENDKLIREVKVITLKSKLVSDFRKDFQFYKVREINNYHHAHDAYLNAVVGTALIKKYPKLESEFVYGDYKVYDVRKMIAKSEQEIGKATAKYFFYSNIMNFFKTEITLANGEIRKRPLIETNGETGEIVWDKGRDFATVRKVLSMPQVNIVKKTEVQTGGFSKESILPKRNSDKLIARKKDWDPKKYGGFDSPTVAYSVLVVAKVEKGKSKKLKSVKELLGITIMERSSFEKNPIDFLEAKGYKEVKKDLIIKLPKYSLFELENGRKRMLASAGELQKGNELALPSKYVNFLYLASHYEKLKGSPEDNEQKQLFVEQHKHYLDEIIEQISEFSKRVILADANLDKVLSAYNKHRDKPIREQAENIIHLFTLTNLGAPAAFKYFDTTIDRKRYTSTKEVLDATLIHQSITGLYETRIDLSQLGGDGGGSSGGGPAPGGTAPLEEEYRLFLEAPIQNVTLLEQWKREIPKVWAEINPPGLASTQAPIHVQLLSTALPVRVRQYPITLEAKRSLRETIRKFRAAGILRPVHSPWNTPLLPVRKSGTSEYRMVQDLREVNKRVETIHPTVPNPYTLLSLLPPDRIWYSVLDLKDAFFCIPLAPESQLIFAFEWADAEEGESGQLTWTRLPQGFKNSPTLFNEALNRDLQGFRLDHPSVSLLQYVDDLLIAADTQAACLSATRDLLMTLAELGYRVSGKKAQLCQEEVTYLGFKIHKGSRSLSNSRTQAILQIPVPKTKRQVREFLGTIGYCRLWIPGFAELAQPLYAATRPGNDPLVWGEKEEEAFQSLKLALTQPPALALPSLDKPFQLFVEETSGAAKGVLTQALGPWKRPVAYLSKRLDPVAAGWPRCLRAIAAAALLTREASKLTFGQDIEITSSHNLESLLRSPPDKWLTNARITQYQVLLLDPPRVRFKQTAALNPATLLPETDDTLPIHHCLDTLDSLTSTRPDLTDQPLAQAEATLFTDGSSYIRDGKRYAGAAVVTLDSVIWAEPLPIGTSAQKAELIALTKALEWSKDKSVNIYTDSRYAFATLHVHGMIYRERGWLTAGGKAIKNAPEILALLTAVWLPKRVAVMHCKGHQKDDAPTSTGNRRADEVAREVAIRPLSTQATISAGKRTADGSEFEKRTADGSEFESPKKKAKVE

SEQ ID NO: 7381 - protein, 2096 aa, synthetic construct
MPAAKRVKLDGGDKKYSIGLDIGTNSVGWAVITDEYKVPSKKFKVLGNTDRHSIKKNLIGALLFDSGETAEATRLKRTARRRYTRRKNRICYLQEIFSNEMAKVDDSFFHRLEESFLVEEDKKHERHPIFGNIVDEVAYHEKYPTIYHLRKKLVDSTDKADLRLIYLALAHMIKFRGHFLIEGDLNPDNSDVDKLFIQLVQTYNQLFEENPINASGVDAKAILSARLSKSRRLENLIAQLPGEKKNGLFGNLIALSLGLTPNFKSNFDLAEDAKLQLSKDTYDDDLDNLLAQIGDQYADLFLAAKNLSDAILLSDILRVNTEITKAPLSASMIKRYDEHHQDLTLLKALVRQQLPEKYKEIFFDQSKNGYAGYIDGGASQEEFYKFIKPILEKMDGTEELLVKLNREDLLRKQRTFDNGSIPHQIHLGELHAILRRQEDFYPFLKDNREKIEKILTFRIPYYVGPLARGNSRFAWMTRKSEETITPWNFEEVVDKGASAQSFIERMTNFDKNLPNEKVLPKHSLLYEYFTVYNELTKVKYVTEGMRKPAFLSGEQKKAIVDLLFKTNRKVTVKQLKEDYFKKIECFDSVEISGVEDRFNASLGTYHDLLKIIKDKDFLDNEENEDILEDIVLTLTLFEDREMIEERLKTYAHLFDDKVMKQLKRRRYTGWGRLSRKLINGIRDKQSGKTILDFLKSDGFANRNFMQLIHDDSLTFKEDIQKAQVSGQGDSLHEHIANLAGSPAIKKGILQTVKVVDELVKVMGRHKPENIVIEMARENQTTQKGQKNSRERMKRIEEGIKELGSQILKEHPVENTQLQNEKLYLYYLQNGRDMYVDQELDINRLSDYDVDHIVPQSFLKDDSIDNKVLTRSDKARGKSDNVPSEEVVKKMKNYWRQLLNAKLITQRKFDNLTKAERGGLSELDKAGFIKRQLVETRQITKHVAQILDSRMNTKYDENDKLIREVKVITLKSKLVSDFRKDFQFYKVREINNYHHAHDAYLNAVVGTALIKKYPKLESEFVYGDYKVYDVRKMIAKSEQEIGKATAKYFFYSNIMNFFKTEITLANGEIRKRPLIETNGETGEIVWDKGRDFATVRKVLSMPQVNIVKKTEVQTGGFSKESILPKRNSDKLIARKKDWDPKKYGGFDSPTVAYSVLVVAKVEKGKSKKLKSVKELLGITIMERSSFEKNPIDFLEAKGYKEVKKDLIIKLPKYSLFELENGRKRMLASAGELQKGNELALPSKYVNFLYLASHYEKLKGSPEDNEQKQLFVEQHKHYLDEIIEQISEFSKRVILADANLDKVLSAYNKHRDKPIREQAENIIHLFTLTNLGAPAAFKYFDTTIDRKRYTSTKEVLDATLIHQSITGLYETRIDLSQLGGDGGGSSGGGPAPGGTAPLEEEYRLFLEAPIQNVTLLEQWKREIPKVWAEINPPGLASTQAPIHVQLLSTALPVRVRQYPITLEAKRSLRETIRKFRAAGILRPVHSPWNTPLLPVRKSGTSEYRMVQDLREVNKRVETIHPTVPNPYTLLSLLPPDRIWYSVLDLKDAFFCIPLAPESQLIFAFEWADAEEGESGQLTWTRLPQGFKNSPTLFNEALNRDLQGFRLDHPSVSLLQYVDDLLIAADTQAACLSATRDLLMTLAELGYRVSGKKAQLCQEEVTYLGFKIHKGSRSLSNSRTQAILQIPVPKTKRQVREFLGKIGYCRLFIPGFAELAQPLYAATRPGNDPLVWGEKEEEAFQSLKLALTQPPALALPSLDKPFQLFVEETSGAAKGVLTQALGPWKRPVAYLSKRLDPVAAGWPRCLRAIAAAALLTREASKLTFGQDIEITSSHNLESLLRSPPDKWLTNARITQYQVLLLDPPRVRFKQTAALNPATLLPETDDTLPIHHCLDTLDSLTSTRPDLTDQPLAQAEATLFTDGSSYIRDGKRYAGAAVVTLDSVIWAEPLPIGTSAQKAELIALTKALEWSKDKSVNIYTDSRYAFATLHVHGMIYRERGWLTAGGKAIKNAPEILALLTAVWLPKRVAVMHCKGHQKDDAPTSTGNRRADEVAREVAIRPLSTQATISAGKRTADGSEFEKRTADGSEFESPKKKAKVE

SEQ ID NO: 7382 - protein, 2100 aa, synthetic construct
MPAAKRVKLDGGDKKYSIGLDIGTNSVGWAVITDEYKVPSKKFKVLGNTDRHSIKKNLIGALLFDSGETAEATRLKRTARRRYTRRKNRICYLQEIFSNEMAKVDDSFFHRLEESFLVEEDKKHERHPIFGNIVDEVAYHEKYPTIYHLRKKLVDSTDKADLRLIYLALAHMIKFRGHFLIEGDLNPDNSDVDKLFIQLVQTYNQLFEENPINASGVDAKAILSARLSKSRRLENLIAQLPGEKKNGLFGNLIALSLGLTPNFKSNFDLAEDAKLQLSKDTYDDDLDNLLAQIGDQYADLFLAAKNLSDAILLSDILRVNTEITKAPLSASMIKRYDEHHQDLTLLKALVRQQLPEKYKEIFFDQSKNGYAGYIDGGASQEEFYKFIKPILEKMDGTEELLVKLNREDLLRKQRTFDNGSIPHQIHLGELHAILRRQEDFYPFLKDNREKIEKILTFRIPYYVGPLARGNSRFAWMTRKSEETITPWNFEEVVDKGASAQSFIERMTNFDKNLPNEKVLPKHSLLYEYFTVYNELTKVKYVTEGMRKPAFLSGEQKKAIVDLLFKTNRKVTVKQLKEDYFKKIECFDSVEISGVEDRFNASLGTYHDLLKIIKDKDFLDNEENEDILEDIVLTLTLFEDREMIEERLKTYAHLFDDKVMKQLKRRRYTGWGRLSRKLINGIRDKQSGKTILDFLKSDGFANRNFMQLIHDDSLTFKEDIQKAQVSGQGDSLHEHIANLAGSPAIKKGILQTVKVVDELVKVMGRHKPENIVIEMARENQTTQKGQKNSRERMKRIEEGIKELGSQILKEHPVENTQLQNEKLYLYYLQNGRDMYVDQELDINRLSDYDVDHIVPQSFLKDDSIDNKVLTRSDKARGKSDNVPSEEVVKKMKNYWRQLLNAKLITQRKFDNLTKAERGGLSELDKAGFIKRQLVETRQITKHVAQILDSRMNTKYDENDKLIREVKVITLKSKLVSDFRKDFQFYKVREINNYHHAHDAYLNAVVGTALIKKYPKLESEFVYGDYKVYDVRKMIAKSEQEIGKATAKYFFYSNIMNFFKTEITLANGEIRKRPLIETNGETGEIVWDKGRDFATVRKVLSMPQVNIVKKTEVQTGGFSKESILPKRNSDKLIARKKDWDPKKYGGFDSPTVAYSVLVVAKVEKGKSKKLKSVKELLGITIMERSSFEKNPIDFLEAKGYKEVKKDLIIKLPKYSLFELENGRKRMLASAGELQKGNELALPSKYVNFLYLASHYEKLKGSPEDNEQKQLFVEQHKHYLDEIIEQISEFSKRVILADANLDKVLSAYNKHRDKPIREQAENIIHLFTLTNLGAPAAFKYFDTTIDRKRYTSTKEVLDATLIHQSITGLYETRIDLSQLGGDGGGSSGGGPAPGGTVSLQDEHRLFDIPVTTSLPDVWLQDFPQAWAETGGLGRAKCQAPIIIDLKPTAVPVSIKQYPMSLEAHMGIRQHIIKFLELGVLRPCRSPWNTPLLPVKKPGTQDYRPVQDLREINKRTVDIHPTVPNPYNLLSTLKPDYSWYTVLDLKDAFFCLPLAPQSQELFAFEWKDPERGISGQLTWTRLPQGFKNSPTLFNEALHRDLTDFRTQHPEVTLLQYVDDLLLAAPTKKACTQGTRHLLQELGEKGYRASAKKAQICQTKVTYLGYILSEGKRWLTPGRIETVARIPPPRNPREVREFLGTAGFCRLWIPGFAELAAPLYALTKPSTPFTWQTEHQLAFEALKKALLSAPALGLPDTSKPFTLFLDERQGIAKGVLTQKLGPWKRPVAYLSKKLDPVAAGWPPCLRIMAATAMLVKDSAKLTLGQPLTVITPHTLEAIVRQPPDRWITNARLTHYQALLLDTDRVQFGPPVTLNPATLLPVPENQPSPHDCRQVLAETHGTREDLKDQELPDADHTWYTDGSSYLDSGTRRAGAAVVDGHNTIWAQSLPPGTSAQKAELIALTKALELSKGKKANIYTDSRYAFATAHTHGSIYERRGWLTSEGKEIKNKAEIIALLKALFLPQEVAIIHCPGHQKGQDPVAVGNRQADRVARQAAMAEVLTLATEPDNTSHITAGKRTADGSEFEKRTADGSEFESPKKKAKVE

SEQ ID NO: 7383 - protein, 2085 aa, synthetic construct
MPAAKRVKLDGGDKKYSIGLDIGTNSVGWAVITDEYKVPSKKFKVLGNTDRHSIKKNLIGALLFDSGETAEATRLKRTARRRYTRRKNRICYLQEIFSNEMAKVDDSFFHRLEESFLVEEDKKHERHPIFGNIVDEVAYHEKYPTIYHLRKKLVDSTDKADLRLIYLALAHMIKFRGHFLIEGDLNPDNSDVDKLFIQLVQTYNQLFEENPINASGVDAKAILSARLSKSRRLENLIAQLPGEKKNGLFGNLIALSLGLTPNFKSNFDLAEDAKLQLSKDTYDDDLDNLLAQIGDQYADLFLAAKNLSDAILLSDILRVNTEITKAPLSASMIKRYDEHHQDLTLLKALVRQQLPEKYKEIFFDQSKNGYAGYIDGGASQEEFYKFIKPILEKMDGTEELLVKLNREDLLRKQRTFDNGSIPHQIHLGELHAILRRQEDFYPFLKDNREKIEKILTFRIPYYVGPLARGNSRFAWMTRKSEETITPWNFEEVVDKGASAQSFIERMTNFDKNLPNEKVLPKHSLLYEYFTVYNELTKVKYVTEGMRKPAFLSGEQKKAIVDLLFKTNRKVTVKQLKEDYFKKIECFDSVEISGVEDRFNASLGTYHDLLKIIKDKDFLDNEENEDILEDIVLTLTLFEDREMIEERLKTYAHLFDDKVMKQLKRRRYTGWGRLSRKLINGIRDKQSGKTILDFLKSDGFANRNFMQLIHDDSLTFKEDIQKAQVSGQGDSLHEHIANLAGSPAIKKGILQTVKVVDELVKVMGRHKPENIVIEMARENQTTQKGQKNSRERMKRIEEGIKELGSQILKEHPVENTQLQNEKLYLYYLQNGRDMYVDQELDINRLSDYDVDHIVPQSFLKDDSIDNKVLTRSDKARGKSDNVPSEEVVKKMKNYWRQLLNAKLITQRKFDNLTKAERGGLSELDKAGFIKRQLVETRQITKHVAQILDSRMNTKYDENDKLIREVKVITLKSKLVSDFRKDFQFYKVREINNYHHAHDAYLNAVVGTALIKKYPKLESEFVYGDYKVYDVRKMIAKSEQEIGKATAKYFFYSNIMNFFKTEITLANGEIRKRPLIETNGETGEIVWDKGRDFATVRKVLSMPQVNIVKKTEVQTGGFSKESILPKRNSDKLIARKKDWDPKKYGGFDSPTVAYSVLVVAKVEKGKSKKLKSVKELLGITIMERSSFEKNPIDFLEAKGYKEVKKDLIIKLPKYSLFELENGRKRMLASAGELQKGNELALPSKYVNFLYLASHYEKLKGSPEDNEQKQLFVEQHKHYLDEIIEQISEFSKRVILADANLDKVLSAYNKHRDKPIREQAENIIHLFTLTNLGAPAAFKYFDTTIDRKRYTSTKEVLDATLIHQSITGLYETRIDLSQLGGDGGGSSGGGPAPGGVPWILKKPLELTIKLDLEEQQGTLLNNSILSKKGKEELKQLFEKYSALWQSWENQVGHRRIRPHKIATGTVKPTPQKQYHINPKAKPDIQIVINDLLKQGVLIQKESTMNTPVYPVPKPNGRWRMVLDYRAVNKVTPLIAVQNQHSYGILGSLFKGRYKTTIDLSNGFWAHPIVPEDYWITAFTWQGKQYCWTVLPQGFLNSPGLFTGDVVDLLQGIPNVEVYVDDVYISHDSEKEHLEYLDILFNRLKEAGYIISLKKSNIANSIVDFLGFQITNEGRGLTDTFKEKLENITAPTTLKQLQSILGLLNFARNFIPDFTELIAPLYALIPKSTKNYVPWQIEHSTTLETLITKLNGAEYLQGRKGDKTLIMKVNASYTTGYIRYYNEGEKKPISYVSIVFSKTELKFTELEKLLTTVHKGLLKALDLSMGQNIHVYSPIVSMQNIQKTPQTAKKALASRWLSWLSYLEDPRIRFFYDPQMPALKDLPAVDTGKDNKKHPSNFQHIFYTDGSAITSPTKEGHLNAGMGIVYFINKDGNLQKQQEWSISLGNHTAQFAEIAAFEFALKKCLPLGGNILVVTDSNYVAKAYNEELDVWASNGFVNNRKKPLKHISKWKSVADLKRLRPDVVVTHEPGHQKLDSSPHAYGNNLADQLATQASFKVHAGKRTADGSEFEKRTADGSEFESPKKKAKVE

SEQ ID NO: 7384 - protein, 2093 aa, synthetic construct
MPAAKRVKLDGGDKKYSIGLDIGTNSVGWAVITDEYKVPSKKFKVLGNTDRHSIKKNLIGALLFDSGETAEATRLKRTARRRYTRRKNRICYLQEIFSNEMAKVDDSFFHRLEESFLVEEDKKHERHPIFGNIVDEVAYHEKYPTIYHLRKKLVDSTDKADLRLIYLALAHMIKFRGHFLIEGDLNPDNSDVDKLFIQLVQTYNQLFEENPINASGVDAKAILSARLSKSRRLENLIAQLPGEKKNGLFGNLIALSLGLTPNFKSNFDLAEDAKLQLSKDTYDDDLDNLLAQIGDQYADLFLAAKNLSDAILLSDILRVNTEITKAPLSASMIKRYDEHHQDLTLLKALVRQQLPEKYKEIFFDQSKNGYAGYIDGGASQEEFYKFIKPILEKMDGTEELLVKLNREDLLRKQRTFDNGSIPHQIHLGELHAILRRQEDFYPFLKDNREKIEKILTFRIPYYVGPLARGNSRFAWMTRKSEETITPWNFEEVVDKGASAQSFIERMTNFDKNLPNEKVLPKHSLLYEYFTVYNELTKVKYVTEGMRKPAFLSGEQKKAIVDLLFKTNRKVTVKQLKEDYFKKIECFDSVEISGVEDRFNASLGTYHDLLKIIKDKDFLDNEENEDILEDIVLTLTLFEDREMIEERLKTYAHLFDDKVMKQLKRRRYTGWGRLSRKLINGIRDKQSGKTILDFLKSDGFANRNFMQLIHDDSLTFKEDIQKAQVSGQGDSLHEHIANLAGSPAIKKGILQTVKVVDELVKVMGRHKPENIVIEMARENQTTQKGQKNSRERMKRIEEGIKELGSQILKEHPVENTQLQNEKLYLYYLQNGRDMYVDQELDINRLSDYDVDHIVPQSFLKDDSIDNKVLTRSDKARGKSDNVPSEEVVKKMKNYWRQLLNAKLITQRKFDNLTKAERGGLSELDKAGFIKRQLVETRQITKHVAQILDSRMNTKYDENDKLIREVKVITLKSKLVSDFRKDFQFYKVREINNYHHAHDAYLNAVVGTALIKKYPKLESEFVYGDYKVYDVRKMIAKSEQEIGKATAKYFFYSNIMNFFKTEITLANGEIRKRPLIETNGETGEIVWDKGRDFATVRKVLSMPQVNIVKKTEVQTGGFSKESILPKRNSDKLIARKKDWDPKKYGGFDSPTVAYSVLVVAKVEKGKSKKLKSVKELLGITIMERSSFEKNPIDFLEAKGYKEVKKDLIIKLPKYSLFELENGRKRMLASAGELQKGNELALPSKYVNFLYLASHYEKLKGSPEDNEQKQLFVEQHKHYLDEIIEQISEFSKRVILADANLDKVLSAYNKHRDKPIREQAENIIHLFTLTNLGAPAAFKYFDTTIDRKRYTSTKEVLDATLIHQSITGLYETRIDLSQLGGDGGGSSGGGPAPGGTLQLEEEYRLFEPESTQKQEMDIWLKNFPQAWAETGGMGTAHCQAPVLIQLKATATPISIRQYPMPHEAYQGIKPHIRRMLDQGILKPCQSPWNTPLLPVKKPGTEDYRPVQDLREVNKRVEDIHPTVPNPYNLLSTLPPSHPWYTVLDLKDAFFCLRLHSESQLLFAFEWRDPEIGLSGQLTWTRLPQGFKNSPTLFNEALHSDLADFRVRYPALVLLQYVDDLLLAAATRTECLEGTKALLETLGNKGYRASAKKAQICLQEVTYLGYSLKDGQRWLTKARKEAILSIPVPKNSRQVREFLGTAGYCRLWIPGFAELAAPLYPLTRPGTLFQWGTEQQLAFEDIKKALLSSPALGLPDITKPFELFIDENSGFAKGVLVQKLGPWKRPVAYLSKKLDTVASGWPPCLRMVAAIAILVKDAGKLTLGQPLTILTSHPVEALVRQPPNKWLSNARMTHYQAMLLDAERVHFGPTVSLNPATLLPLPSGGNHHDCLQILAETHGTRPDLTDQPLPDADLTWYTDGSSFIRNGEREAGAAVTTESEVIWAAPLPPGTSAQRAELIALTQALKMAEGKKLTVYTDSRYAFATTHVHGEIYRRRGWLTSEGKEIKNKNEILALLEALFLPKRLSIIHCPGHQKGDSPQAKGNRLADDTAKKAATETHSSLTVLPAGKRTADGSEFEKRTADGSEFESPKKKAKVE

SEQ ID NO: 7385 - protein, 2174 aa, synthetic construct
MPAAKRVKLDGGDKKYSIGLDIGTNSVGWAVITDEYKVPSKKFKVLGNTDRHSIKKNLIGALLFDSGETAEATRLKRTARRRYTRRKNRICYLQEIFSNEMAKVDDSFFHRLEESFLVEEDKKHERHPIFGNIVDEVAYHEKYPTIYHLRKKLVDSTDKADLRLIYLALAHMIKFRGHFLIEGDLNPDNSDVDKLFIQLVQTYNQLFEENPINASGVDAKAILSARLSKSRRLENLIAQLPGEKKNGLFGNLIALSLGLTPNFKSNFDLAEDAKLQLSKDTYDDDLDNLLAQIGDQYADLFLAAKNLSDAILLSDILRVNTEITKAPLSASMIKRYDEHHQDLTLLKALVRQQLPEKYKEIFFDQSKNGYAGYIDGGASQEEFYKFIKPILEKMDGTEELLVKLNREDLLRKQRTFDNGSIPHQIHLGELHAILRRQEDFYPFLKDNREKIEKILTFRIPYYVGPLARGNSRFAWMTRKSEETITPWNFEEVVDKGASAQSFIERMTNFDKNLPNEKVLPKHSLLYEYFTVYNELTKVKYVTEGMRKPAFLSGEQKKAIVDLLFKTNRKVTVKQLKEDYFKKIECFDSVEISGVEDRFNASLGTYHDLLKIIKDKDFLDNEENEDILEDIVLTLTLFEDREMIEERLKTYAHLFDDKVMKQLKRRRYTGWGRLSRKLINGIRDKQSGKTILDFLKSDGFANRNFMQLIHDDSLTFKEDIQKAQVSGQGDSLHEHIANLAGSPAIKKGILQTVKVVDELVKVMGRHKPENIVIEMARENQTTQKGQKNSRERMKRIEEGIKELGSQILKEHPVENTQLQNEKLYLYYLQNGRDMYVDQELDINRLSDYDVDHIVPQSFLKDDSIDNKVLTRSDKARGKSDNVPSEEVVKKMKNYWRQLLNAKLITQRKFDNLTKAERGGLSELDKAGFIKRQLVETRQITKHVAQILDSRMNTKYDENDKLIREVKVITLKSKLVSDFRKDFQFYKVREINNYHHAHDAYLNAVVGTALIKKYPKLESEFVYGDYKVYDVRKMIAKSEQEIGKATAKYFFYSNIMNFFKTEITLANGEIRKRPLIETNGETGEIVWDKGRDFATVRKVLSMPQVNIVKKTEVQTGGFSKESILPKRNSDKLIARKKDWDPKKYGGFDSPTVAYSVLVVAKVEKGKSKKLKSVKELLGITIMERSSFEKNPIDFLEAKGYKEVKKDLIIKLPKYSLFELENGRKRMLASAGELQKGNELALPSKYVNFLYLASHYEKLKGSPEDNEQKQLFVEQHKHYLDEIIEQISEFSKRVILADANLDKVLSAYNKHRDKPIREQAENIIHLFTLTNLGAPAAFKYFDTTIDRKRYTSTKEVLDATLIHQSITGLYETRIDLSQLGGDGGGSSGGGPAPGGMNPLQLLQPLPAEIKGTKLLAHWNSGATITCIPESFLEDEQPIKKTLIKTIHGEKQQNVYYVTFKVKGRKVEAEVIASPYEYILLSPTDVPWLTQQPLQLTILVPLQEYQEKILSKTALPEDQKQQLKTLFVKYDNLWQHWENQVGHRKIRPHNIATGDYPPRPQKQYPINPKAKPSIQIVIDDLLKQGVLTPQNSTMNTPVYPVPKPDGRWRMVLDYREVNKTIPLTAAQNQHSAGILATIVRQKYKTTLDLANGFWAHPITPESYWLTAFTWQGKQYCWTRLPQGFLNSPALFNADVVDLLKEIPNVQVYVDDIYLSHDDPKEHVQQLEKVFQILLQAGYVVSLKKSEIGQKTVEFLGFNITKEGRGLTDTFKTKLLNITPPKDLKQLQSILGLLNFARNFIPNFAELVQPLYNLIAPAKGKYIEWSEENTKQLNMVIEALNTASNLEERLPEQRLVIKVNTSPSAGYVRYYNETGKKPIMYLNYVFSKAELKFSMLEKLLTTMHKALIKAMDLAMGQEILVYSPIVSMTKIQKTPLPERKALPIRWITWMTYLEDPRIQFHYDKTLPELKHIPDVYTSSQSPVKHPSQYEGVFYTDGSAIKSPDPTKSNNAGMGIVHATYKPEYQVLNQWSIPLGNHTAQMAEIAAVEFACKKALKIPGPVLVITDSFYVAESANKELPYWKSNGFVNNKKKPLKHISKWKSIAECLSMKPDITIQHEKGISLQIPVFILKGNALADKLATQGSYVVNAGKRTADGSEFEKRTADGSEFESPKKKAKVE

SEQ ID NO: 7386 - protein, 2125 aa, synthetic construct
MPAAKRVKLDGGDKKYSIGLDIGTNSVGWAVITDEYKVPSKKFKVLGNTDRHSIKKNLIGALLFDSGETAEATRLKRTARRRYTRRKNRICYLQEIFSNEMAKVDDSFFHRLEESFLVEEDKKHERHPIFGNIVDEVAYHEKYPTIYHLRKKLVDSTDKADLRLIYLALAHMIKFRGHFLIEGDLNPDNSDVDKLFIQLVQTYNQLFEENPINASGVDAKAILSARLSKSRRLENLIAQLPGEKKNGLFGNLIALSLGLTPNFKSNFDLAEDAKLQLSKDTYDDDLDNLLAQIGDQYADLFLAAKNLSDAILLSDILRVNTEITKAPLSASMIKRYDEHHQDLTLLKALVRQQLPEKYKEIFFDQSKNGYAGYIDGGASQEEFYKFIKPILEKMDGTEELLVKLNREDLLRKQRTFDNGSIPHQIHLGELHAILRRQEDFYPFLKDNREKIEKILTFRIPYYVGPLARGNSRFAWMTRKSEETITPWNFEEVVDKGASAQSFIERMTNFDKNLPNEKVLPKHSLLYEYFTVYNELTKVKYVTEGMRKPAFLSGEQKKAIVDLLFKTNRKVTVKQLKEDYFKKIECFDSVEISGVEDRFNASLGTYHDLLKIIKDKDFLDNEENEDILEDIVLTLTLFEDREMIEERLKTYAHLFDDKVMKQLKRRRYTGWGRLSRKLINGIRDKQSGKTILDFLKSDGFANRNFMQLIHDDSLTFKEDIQKAQVSGQGDSLHEHIANLAGSPAIKKGILQTVKVVDELVKVMGRHKPENIVIEMARENQTTQKGQKNSRERMKRIEEGIKELGSQILKEHPVENTQLQNEKLYLYYLQNGRDMYVDQELDINRLSDYDVDHIVPQSFLKDDSIDNKVLTRSDKARGKSDNVPSEEVVKKMKNYWRQLLNAKLITQRKFDNLTKAERGGLSELDKAGFIKRQLVETRQITKHVAQILDSRMNTKYDENDKLIREVKVITLKSKLVSDFRKDFQFYKVREINNYHHAHDAYLNAVVGTALIKKYPKLESEFVYGDYKVYDVRKMIAKSEQEIGKATAKYFFYSNIMNFFKTEITLANGEIRKRPLIETNGETGEIVWDKGRDFATVRKVLSMPQVNIVKKTEVQTGGFSKESILPKRNSDKLIARKKDWDPKKYGGFDSPTVAYSVLVVAKVEKGKSKKLKSVKELLGITIMERSSFEKNPIDFLEAKGYKEVKKDLIIKLPKYSLFELENGRKRMLASAGELQKGNELALPSKYVNFLYLASHYEKLKGSPEDNEQKQLFVEQHKHYLDEIIEQISEFSKRVILADANLDKVLSAYNKHRDKPIREQAENIIHLFTLTNLGAPAAFKYFDTTIDRKRYTSTKEVLDATLIHQSITGLYETRIDLSQLGGDGGGSSGGGPAPGGLLGRDLLTKLKAQIQFSTEGPQVTWEDRPAMCLVLNLEEEYRLHEKPVPPSIDPSWLQLFPMVWAEKAGMGLANQVPPVVVELKSDASPVAVRQYPMSKEAREGIRPHIQRFLDLGILVPCQSPWNTPLLPVKKPGTNDYRPVQDLREVNKRVQDIHPTVPNPYNLLSSLPPSHTWYSVLDLKDAFFCLKLHPNSQPLFAFEWRDPEKGNTGQLTWTRLPQGFKNSPTLFNEALHRDLASFRALNPQVVMLQYVDDLLVAAPTYRDCKEGTRRLLQELSKLGYRVSAKKAQLCREEVTYLGYLLKGGKRWLTPARKATVMKIPTPTTPRQVREFLGTAGFCRLWIPGFASLAAPLYPLTRPKVPFTWTEAHQEAFGRIKEALLSAPALALPDLTKPFALYVDEKEGVARGVLTQTLGPWRRPVAYLSKKLDPVASGWPTCLKAIAAVALLLKDADKLTLGQNVLVIAPHNLESIVRQPPDRWMTNARMTHYQSLLLNERVSFAPPAILNPATLLPVESDDTPIHICSEILAEETGTRPDLRDQPLPGVPAWYTDGSSFIMDGRRQAGAAIVDNKRTVWASNLPEGTSAQKAELIALTQALRLAEGKSINIYTDSRYAFATAHVHGAIYKQRGWLTSAGKDIKNKEEILALLEAIHLPKRVAIIHCPGHQRGTDPVATGNRKADEAAKQAAQSTRILTETTKNAGKRTADGSEFEKRTADGSEFESPKKKAKVE

SEQ ID NO: 7387 - protein, 2216 aa, synthetic construct
MPAAKRVKLDGGDKKYSIGLDIGTNSVGWAVITDEYKVPSKKFKVLGNTDRHSIKKNLIGALLFDSGETAEATRLKRTARRRYTRRKNRICYLQEIFSNEMAKVDDSFFHRLEESFLVEEDKKHERHPIFGNIVDEVAYHEKYPTIYHLRKKLVDSTDKADLRLIYLALAHMIKFRGHFLIEGDLNPDNSDVDKLFIQLVQTYNQLFEENPINASGVDAKAILSARLSKSRRLENLIAQLPGEKKNGLFGNLIALSLGLTPNFKSNFDLAEDAKLQLSKDTYDDDLDNLLAQIGDQYADLFLAAKNLSDAILLSDILRVNTEITKAPLSASMIKRYDEHHQDLTLLKALVRQQLPEKYKEIFFDQSKNGYAGYIDGGASQEEFYKFIKPILEKMDGTEELLVKLNREDLLRKQRTFDNGSIPHQIHLGELHAILRRQEDFYPFLKDNREKIEKILTFRIPYYVGPLARGNSRFAWMTRKSEETITPWNFEEVVDKGASAQSFIERMTNFDKNLPNEKVLPKHSLLYEYFTVYNELTKVKYVTEGMRKPAFLSGEQKKAIVDLLFKTNRKVTVKQLKEDYFKKIECFDSVEISGVEDRFNASLGTYHDLLKIIKDKDFLDNEENEDILEDIVLTLTLFEDREMIEERLKTYAHLFDDKVMKQLKRRRYTGWGRLSRKLINGIRDKQSGKTILDFLKSDGFANRNFMQLIHDDSLTFKEDIQKAQVSGQGDSLHEHIANLAGSPAIKKGILQTVKVVDELVKVMGRHKPENIVIEMARENQTTQKGQKNSRERMKRIEEGIKELGSQILKEHPVENTQLQNEKLYLYYLQNGRDMYVDQELDINRLSDYDVDHIVPQSFLKDDSIDNKVLTRSDKARGKSDNVPSEEVVKKMKNYWRQLLNAKLITQRKFDNLTKAERGGLSELDKAGFIKRQLVETRQITKHVAQILDSRMNTKYDENDKLIREVKVITLKSKLVSDFRKDFQFYKVREINNYHHAHDAYLNAVVGTALIKKYPKLESEFVYGDYKVYDVRKMIAKSEQEIGKATAKYFFYSNIMNFFKTEITLANGEIRKRPLIETNGETGEIVWDKGRDFATVRKVLSMPQVNIVKKTEVQTGGFSKESILPKRNSDKLIARKKDWDPKKYGGFDSPTVAYSVLVVAKVEKGKSKKLKSVKELLGITIMERSSFEKNPIDFLEAKGYKEVKKDLIIKLPKYSLFELENGRKRMLASAGELQKGNELALPSKYVNFLYLASHYEKLKGSPEDNEQKQLFVEQHKHYLDEIIEQISEFSKRVILADANLDKVLSAYNKHRDKPIREQAENIIHLFTLTNLGAPAAFKYFDTTIDRKRYTSTKEVLDATLIHQSITGLYETRIDLSQLGGDGGGSSGGGPAPGGTLGDQGSRGSDPLPEPRVTLTVEGIPTEFLVNTGAEHSVLTKPMGKMGSKRTVVAGATGSKVYPWTTKRLLKIGQKQVTHSFLVIPECPAPLLGRDLLTKLKAQIQFSTEGPQVTWEDRPAMCLVLNLEEEYRLHEKPVPPSIDPSWLQLFPMVWAEKAGMGLANQVPPVVVELKSDASPVAVRQYPMSKEAREGIRPHIQRFLDLGILVPCQSPWNTPLLPVKKPGTNDYRPVQDLREVNKRVQDIHPTVPNPYNLLSSLPPSHTWYSVLDLKDAFFCLKLHPNSQPLFAFEWRDPEKGNTGQLTWTRLPQGFKNSPTLFNEALHRDLASFRALNPQVVMLQYVDDLLVAAPTYRDCKEGTRRLLQELSKLGYRVSAKKAQLCREEVTYLGYLLKGGKRWLTPARKATVMKIPTPTTPRQVREFLGTAGFCRLWIPGFASLAAPLYPLTRPKVPFTWTEAHQEAFGRIKEALLSAPALALPDLTKPFALYVDEKEGVARGVLTQTLGPWRRPVAYLSKKLDPVASGWPTCLKAIAAVALLLKDADKLTLGQNVLVIAPHNLESIVRQPPDRWMTNARMTHYQSLLLNERVSFAPPAILNPATLLPVESDDTPIHICSEILAEETGTRPDLRDQPLPGVPAWYTDGSSFIMDGRRQAGAAIVDNKRTVWASNLPEGTSAQKAELIALTQALRLAEGKSINIYTDSRYAFATAHVHGAIYKQRGWLTSAGKDIKNKEEILALLEAIHLPKRVAIIHCPGHQRGTDPVATGNRKADEAAKQAAQSTRILTETTKNAGKRTADGSEFEKRTADGSEFESPKKKAKVE

SEQ ID NO: 7388 - protein, 2216 aa, synthetic construct
MPAAKRVKLDGGDKKYSIGLDIGTNSVGWAVITDEYKVPSKKFKVLGNTDRHSIKKNLIGALLFDSGETAEATRLKRTARRRYTRRKNRICYLQEIFSNEMAKVDDSFFHRLEESFLVEEDKKHERHPIFGNIVDEVAYHEKYPTIYHLRKKLVDSTDKADLRLIYLALAHMIKFRGHFLIEGDLNPDNSDVDKLFIQLVQTYNQLFEENPINASGVDAKAILSARLSKSRRLENLIAQLPGEKKNGLFGNLIALSLGLTPNFKSNFDLAEDAKLQLSKDTYDDDLDNLLAQIGDQYADLFLAAKNLSDAILLSDILRVNTEITKAPLSASMIKRYDEHHQDLTLLKALVRQQLPEKYKEIFFDQSKNGYAGYIDGGASQEEFYKFIKPILEKMDGTEELLVKLNREDLLRKQRTFDNGSIPHQIHLGELHAILRRQEDFYPFLKDNREKIEKILTFRIPYYVGPLARGNSRFAWMTRKSEETITPWNFEEVVDKGASAQSFIERMTNFDKNLPNEKVLPKHSLLYEYFTVYNELTKVKYVTEGMRKPAFLSGEQKKAIVDLLFKTNRKVTVKQLKEDYFKKIECFDSVEISGVEDRFNASLGTYHDLLKIIKDKDFLDNEENEDILEDIVLTLTLFEDREMIEERLKTYAHLFDDKVMKQLKRRRYTGWGRLSRKLINGIRDKQSGKTILDFLKSDGFANRNFMQLIHDDSLTFKEDIQKAQVSGQGDSLHEHIANLAGSPAIKKGILQTVKVVDELVKVMGRHKPENIVIEMARENQTTQKGQKNSRERMKRIEEGIKELGSQILKEHPVENTQLQNEKLYLYYLQNGRDMYVDQELDINRLSDYDVDHIVPQSFLKDDSIDNKVLTRSDKARGKSDNVPSEEVVKKMKNYWRQLLNAKLITQRKFDNLTKAERGGLSELDKAGFIKRQLVETRQITKHVAQILDSRMNTKYDENDKLIREVKVITLKSKLVSDFRKDFQFYKVREINNYHHAHDAYLNAVVGTALIKKYPKLESEFVYGDYKVYDVRKMIAKSEQEIGKATAKYFFYSNIMNFFKTEITLANGEIRKRPLIETNGETGEIVWDKGRDFATVRKVLSMPQVNIVKKTEVQTGGFSKESILPKRNSDKLIARKKDWDPKKYGGFDSPTVAYSVLVVAKVEKGKSKKLKSVKELLGITIMERSSFEKNPIDFLEAKGYKEVKKDLIIKLPKYSLFELENGRKRMLASAGELQKGNELALPSKYVNFLYLASHYEKLKGSPEDNEQKQLFVEQHKHYLDEIIEQISEFSKRVILADANLDKVLSAYNKHRDKPIREQAENIIHLFTLTNLGAPAAFKYFDTTIDRKRYTSTKEVLDATLIHQSITGLYETRIDLSQLGGDGGGSSGGGPAPGGTLGDQGSRGSDPLPEPRVTLTVEGIPTEFLVNTGAEHSVLTKPMGKMGSKRTVVAGATGSKVYPWTTKRLLKIGQKQVTHSFLVIPECPAPLLGRDLLTKLKAQIQFSTEGPQVTWEDRPAMCLVLNLEEEYRLHEKPVPPSIDPSWLQLFPMVWAEKAGMGLANQVPPVVVELKSDASPVAVRQYPMSKEAREGIRPHIQRFLDLGILVPCQSPWNTPLLPVKKPGTNDYRPVQDLREVNKRVQDIHPTVPNPYNLLSSLPPSHTWYSVLDLKDAFFCLKLHPNSQPLFAFEWRDPEKGNTGQLTWTRLPQGFKNSPTLFNEALHRDLASFRALNPQVVMLQYVDDLLVAAPTYRDCKEGTRRLLQELSKLGYRVSAKKAQLCREEVTYLGYLLKGGKRWLTPARKATVMKIPTPTTPRQVREFLGKAGFCRLFIPGFASLAAPLYPLTRPKVPFTWTEAHQEAFGRIKEALLSAPALALPDLTKPFALYVDEKEGVARGVLTQTLGPWRRPVAYLSKKLDPVASGWPTCLKAIAAVALLLKDADKLTLGQNVLVIAPHNLESIVRQPPDRWMTNARMTHYQSLLLNERVSFAPPAILNPATLLPVESDDTPIHICSEILAEETGTRPDLRDQPLPGVPAWYTDGSSFIMDGRRQAGAAIVDNKRTVWASNLPEGTSAQKAELIALTQALRLAEGKSINIYTDSRYAFATAHVHGAIYKQRGWLTSAGKDIKNKEEILALLEAIHLPKRVAIIHCPGHQRGTDPVATGNRKADEAAKQAAQSTRILTETTKNAGKRTADGSEFEKRTADGSEFESPKKKAKVE

SEQ ID NO: 7389 - protein, 2094 aa, synthetic construct
MPAAKRVKLDGGDKKYSIGLDIGTNSVGWAVITDEYKVPSKKFKVLGNTDRHSIKKNLIGALLFDSGETAEATRLKRTARRRYTRRKNRICYLQEIFSNEMAKVDDSFFHRLEESFLVEEDKKHERHPIFGNIVDEVAYHEKYPTIYHLRKKLVDSTDKADLRLIYLALAHMIKFRGHFLIEGDLNPDNSDVDKLFIQLVQTYNQLFEENPINASGVDAKAILSARLSKSRRLENLIAQLPGEKKNGLFGNLIALSLGLTPNFKSNFDLAEDAKLQLSKDTYDDDLDNLLAQIGDQYADLFLAAKNLSDAILLSDILRVNTEITKAPLSASMIKRYDEHHQDLTLLKALVRQQLPEKYKEIFFDQSKNGYAGYIDGGASQEEFYKFIKPILEKMDGTEELLVKLNREDLLRKQRTFDNGSIPHQIHLGELHAILRRQEDFYPFLKDNREKIEKILTFRIPYYVGPLARGNSRFAWMTRKSEETITPWNFEEVVDKGASAQSFIERMTNFDKNLPNEKVLPKHSLLYEYFTVYNELTKVKYVTEGMRKPAFLSGEQKKAIVDLLFKTNRKVTVKQLKEDYFKKIECFDSVEISGVEDRFNASLGTYHDLLKIIKDKDFLDNEENEDILEDIVLTLTLFEDREMIEERLKTYAHLFDDKVMKQLKRRRYTGWGRLSRKLINGIRDKQSGKTILDFLKSDGFANRNFMQLIHDDSLTFKEDIQKAQVSGQGDSLHEHIANLAGSPAIKKGILQTVKVVDELVKVMGRHKPENIVIEMARENQTTQKGQKNSRERMKRIEEGIKELGSQILKEHPVENTQLQNEKLYLYYLQNGRDMYVDQELDINRLSDYDVDHIVPQSFLKDDSIDNKVLTRSDKARGKSDNVPSEEVVKKMKNYWRQLLNAKLITQRKFDNLTKAERGGLSELDKAGFIKRQLVETRQITKHVAQILDSRMNTKYDENDKLIREVKVITLKSKLVSDFRKDFQFYKVREINNYHHAHDAYLNAVVGTALIKKYPKLESEFVYGDYKVYDVRKMIAKSEQEIGKATAKYFFYSNIMNFFKTEITLANGEIRKRPLIETNGETGEIVWDKGRDFATVRKVLSMPQVNIVKKTEVQTGGFSKESILPKRNSDKLIARKKDWDPKKYGGFDSPTVAYSVLVVAKVEKGKSKKLKSVKELLGITIMERSSFEKNPIDFLEAKGYKEVKKDLIIKLPKYSLFELENGRKRMLASAGELQKGNELALPSKYVNFLYLASHYEKLKGSPEDNEQKQLFVEQHKHYLDEIIEQISEFSKRVILADANLDKVLSAYNKHRDKPIREQAENIIHLFTLTNLGAPAAFKYFDTTIDRKRYTSTKEVLDATLIHQSITGLYETRIDLSQLGGDGGGSSGGGPAPGGTLNLEDEYRLYETSAEPEVSPGSTWLSDFPQAWAETGGMGLAVRQAPLIIPLKATSTPVSIKQYPMSQEAKLGIKPHIQRLLDQGILVPCQSPWNTPLLPVKKPGTNDYRPVQDLREVNKRVEDIHPTVPNPYNLLSGLPPSHRWYTVLDLKDAFFCLRLHPTSQPLFAFEWRDPGMGISGQLTWTRLPQGFKNSPTLFNEALHRDLADFRIQHPDLILLQYVDDILLAATSELDCQQGTRALLLTLGNLGYRASAKKAQLCQKQVKYLGYLLKEGQRWLTEARKETVMGQPTPKTPRQLREFLGKAGFCRLFIPGFAEMAAPLYPLTKPGTLFNWGPDQQKAYQEIKQALLTAPALGLPDLTKPFELFVDEKQGYAKGVLTQKLGPWRRPVAYLSKKLDPVAAGWPPCLRMVAAIAVLRKDAGKLTMGQPLVILAPHAVEALVKQPPDRWLSNARMTHYQAMLLDTDRVQFGPVVALNPATLLPLPEEGAPHDCLEILAETHGTRPDLTDQPIPDADHTWYTDGSSFLQEGQRKAGAAVTTETEVIWARALPAGTSAQRAELIALTQALKMAEGKRLNVYTDSRYAFATAHIHGEIYRRRGWLTSEGREIKNKSEILALLKALFLPKRLSIIHCLGHQKGDSAEARGNRLADQAAREAAIKTPPDTSTLLAGKRTADGSEFEKRTADGSEFESPKKKAKVE

SEQ ID NO: 7390 - protein, 2094 aa, synthetic construct
MPAAKRVKLDGGDKKYSIGLDIGTNSVGWAVITDEYKVPSKKFKVLGNTDRHSIKKNLIGALLFDSGETAEATRLKRTARRRYTRRKNRICYLQEIFSNEMAKVDDSFFHRLEESFLVEEDKKHERHPIFGNIVDEVAYHEKYPTIYHLRKKLVDSTDKADLRLIYLALAHMIKFRGHFLIEGDLNPDNSDVDKLFIQLVQTYNQLFEENPINASGVDAKAILSARLSKSRRLENLIAQLPGEKKNGLFGNLIALSLGLTPNFKSNFDLAEDAKLQLSKDTYDDDLDNLLAQIGDQYADLFLAAKNLSDAILLSDILRVNTEITKAPLSASMIKRYDEHHQDLTLLKALVRQQLPEKYKEIFFDQSKNGYAGYIDGGASQEEFYKFIKPILEKMDGTEELLVKLNREDLLRKQRTFDNGSIPHQIHLGELHAILRRQEDFYPFLKDNREKIEKILTFRIPYYVGPLARGNSRFAWMTRKSEETITPWNFEEVVDKGASAQSFIERMTNFDKNLPNEKVLPKHSLLYEYFTVYNELTKVKYVTEGMRKPAFLSGEQKKAIVDLLFKTNRKVTVKQLKEDYFKKIECFDSVEISGVEDRFNASLGTYHDLLKIIKDKDFLDNEENEDILEDIVLTLTLFEDREMIEERLKTYAHLFDDKVMKQLKRRRYTGWGRLSRKLINGIRDKQSGKTILDFLKSDGFANRNFMQLIHDDSLTFKEDIQKAQVSGQGDSLHEHIANLAGSPAIKKGILQTVKVVDELVKVMGRHKPENIVIEMARENQTTQKGQKNSRERMKRIEEGIKELGSQILKEHPVENTQLQNEKLYLYYLQNGRDMYVDQELDINRLSDYDVDHIVPQSFLKDDSIDNKVLTRSDKARGKSDNVPSEEVVKKMKNYWRQLLNAKLITQRKFDNLTKAERGGLSELDKAGFIKRQLVETRQITKHVAQILDSRMNTKYDENDKLIREVKVITLKSKLVSDFRKDFQFYKVREINNYHHAHDAYLNAVVGTALIKKYPKLESEFVYGDYKVYDVRKMIAKSEQEIGKATAKYFFYSNIMNFFKTEITLANGEIRKRPLIETNGETGEIVWDKGRDFATVRKVLSMPQVNIVKKTEVQTGGFSKESILPKRNSDKLIARKKDWDPKKYGGFDSPTVAYSVLVVAKVEKGKSKKLKSVKELLGITIMERSSFEKNPIDFLEAKGYKEVKKDLIIKLPKYSLFELENGRKRMLASAGELQKGNELALPSKYVNFLYLASHYEKLKGSPEDNEQKQLFVEQHKHYLDEIIEQISEFSKRVILADANLDKVLSAYNKHRDKPIREQAENIIHLFTLTNLGAPAAFKYFDTTIDRKRYTSTKEVLDATLIHQSITGLYETRIDLSQLGGDGGGSSGGGPAPGGLGIEDEYRLHETSTEPDVSLGSTWLSDFPQAWAETGGMGLAVRQAPLIIPLKATSTPVSIQQYPMSHEARLGIKPHIQRLLDQGILVPCQSPWNTPLLPVKKPGTNDYRPVQDLREVNKRVEDIHPTVPNPYNLLSGLPPSHQWYTVLDLKDAFFCLRLHPTSQPLFAFEWRDPGMGISGQLTWTRLPQGFKNSPTLFNEALHRDLADFRIQHPDLILLQYVDDILLAATSELDCQQGTRALLQTLGDLGYRASAKKAQICQKQVKYLGYLLREGQRWLTEARKETVMGQPVPKTPRQLREFLGKAGFCRLFIPGFAEMAAPLYPLTKPGTLFSWGPDQQKAYQEIKQALLTAPALGLPDLTKPFELFVDEKQGYAKGVLTQKLGPWRRPVAYLSKKLDPVAAGWPPCLRMVAAIAVLTKDAGKLTMGQPLVILAPHAVEALVKQPPDRWLSNARMTHYQAMLLDTDRVQFGPVVALNPATLLPLPEEGAPHDCLEILAETHGTRPDLTDQPIPDADHTWYTDGSSFLQEGQRKAGAAVTTETEVIWAGALPAGTSAQRAELIALTQALKMAEGKRLNVYTDSRYAFATAHIHGEIYRRRGWLTSEGREIKNKSEILALLKALFLPKRLSIIHCLGHQKGDSAEARGNRLADQAAREAAIKTPPDTSTLLIAGKRTADGSEFEKRTADGSEFESPKKKAKVE

SEQ ID NO: 7391 - protein, 2094 aa, synthetic construct; identical to SEQ ID NO: 7390

SEQ ID NO: 7392 - protein, 2094 aa, synthetic construct
MPAAKRVKLDGGDKKYSIGLDIGTNSVGWAVITDEYKVPSKKFKVLGNTDRHSIKKNLIGALLFDSGETAEATRLKRTARRRYTRRKNRICYLQEIFSNEMAKVDDSFFHRLEESFLVEEDKKHERHPIFGNIVDEVAYHEKYPTIYHLRKKLVDSTDKADLRLIYLALAHMIKFRGHFLIEGDLNPDNSDVDKLFIQLVQTYNQLFEENPINASGVDAKAILSARLSKSRRLENLIAQLPGEKKNGLFGNLIALSLGLTPNFKSNFDLAEDAKLQLSKDTYDDDLDNLLAQIGDQYADLFLAAKNLSDAILLSDILRVNTEITKAPLSASMIKRYDEHHQDLTLLKALVRQQLPEKYKEIFFDQSKNGYAGYIDGGASQEEFYKFIKPILEKMDGTEELLVKLNREDLLRKQRTFDNGSIPHQIHLGELHAILRRQEDFYPFLKDNREKIEKILTFRIPYYVGPLARGNSRFAWMTRKSEETITPWNFEEVVDKGASAQSFIERMTNFDKNLPNEKVLPKHSLLYEYFTVYNELTKVKYVTEGMRKPAFLSGEQKKAIVDLLFKTNRKVTVKQLKEDYFKKIECFDSVEISGVEDRFNASLGTYHDLLKIIKDKDFLDNEENEDILEDIVLTLTLFEDREMIEERLKTYAHLFDDKVMKQLKRRRYTGWGRLSRKLINGIRDKQSGKTILDFLKSDGFANRNFMQLIHDDSLTFKEDIQKAQVSGQGDSLHEHIANLAGSPAIKKGILQTVKVVDELVKVMGRHKPENIVIEMARENQTTQKGQKNSRERMKRIEEGIKELGSQILKEHPVENTQLQNEKLYLYYLQNGRDMYVDQELDINRLSDYDVDHIVPQSFLKDDSIDNKVLTRSDKARGKSDNVPSEEVVKKMKNYWRQLLNAKLITQRKFDNLTKAERGGLSELDKAGFIKRQLVETRQITKHVAQILDSRMNTKYDENDKLIREVKVITLKSKLVSDFRKDFQFYKVREINNYHHAHDAYLNAVVGTALIKKYPKLESEFVYGDYKVYDVRKMIAKSEQEIGKATAKYFFYSNIMNFFKTEITLANGEIRKRPLIETNGETGEIVWDKGRDFATVRKVLSMPQVNIVKKTEVQTGGFSKESILPKRNSDKLIARKKDWDPKKYGGFDSPTVAYSVLVVAKVEKGKSKKLKSVKELLGITIMERSSFEKNPIDFLEAKGYKEVKKDLIIKLPKYSLFELENGRKRMLASAGELQKGNELALPSKYVNFLYLASHYEKLKGSPEDNEQKQLFVEQHKHYLDEIIEQISEFSKRVILADANLDKVLSAYNKHRDKPIREQAENIIHLFTLTNLGAPAAFKYFDTTIDRKRYTSTKEVLDATLIHQSITGLYETRIDLSQLGGDGGGSSGGGPAPGGTLNIEDEYRLHETSKGPDVPLGSTWLSDFPQAWAETGGMGLAFRQAPLIISLKATSTPVSIKQYPMSQEARLGIKPHIQRLLDQGILVPCQSPWNTPLLPVKKPGTNDYRPVQDLREVNKRVEDIHPTVPNPYNLLSGLPPSHQWYTVLDLKDAFFCLRLHPTSQSLFAFEWKDPEMGISGQLTWTRLPQGFKNSPTLFNEALHRDLADFRIQHPDLILLQYVDDLLLAATSELDCQQGTRALLQTLGDLGYRASAKKAQICQKQVKYLGYLLKEGQRWLTEARKETVMGQPTPKTPRQLREFLGKAGLCRLFIPGFAEMAAPLYPLTKPGTLFKWGPDQQKAYQEIKQALLTAPALGLPDLTKPFELFVDEKQGYAKGVLTQKLGPWRRPVAYLSKKLDPVAAGWPPCLRMVAAIAVLTKDVGKLTMGQPLVILAPHAVEALVKQPPDRWLSNARMTHYQALLLDTDRVQFGPIVALNPATLLPLPEEGLQHDCLDILAEAHGTRPDLTDQPLPDADHTWYTDGSSFLQEGQRRAGAAVTTETEVIWAKALPAGTSAQRAELIALTQALKMAAGKKLNVYTDSRYAFATAHIHGEIYRRRGWLTSEGKEIKNKDEILALLKALFLPKRLSIIHCPGHQKGNHAEARGNRMADQAAREVATRETPETSTLLAGKRTADGSEFEKRTADGSEFESPKKKAKVE

SEQ ID NO: 7393 - protein, 2094 aa, synthetic construct
MPAAKRVKLDGGDKKYSIGLDIGTNSVGWAVITDEYKVPSKKFKVLGNTDRHSIKKNLIGALLFDSGETAEATRLKRTARRRYTRRKNRICYLQEIFSNEMAKVDDSFFHRLEESFLVEEDKKHERHPIFGNIVDEVAYHEKYPTIYHLRKKLVDSTDKADLRLIYLALAHMIKFRGHFLIEGDLNPDNSDVDKLFIQLVQTYNQLFEENPINASGVDAKAILSARLSKSRRLENLIAQLPGEKKNGLFGNLIALSLGLTPNFKSNFDLAEDAKLQLSKDTYDDDLDNLLAQIGDQYADLFLAAKNLSDAILLSDILRVNTEITKAPLSASMIKRYDEHHQDLTLLKALVRQQLPEKYKEIFFDQSKNGYAGYIDGGASQEEFYKFIKPILEKMDGTEELLVKLNREDLLRKQRTFDNGSIPHQIHLGELHAILRRQEDFYPFLKDNREKIEKILTFRIPYYVGPLARGNSRFAWMTRKSEETITPWNFEEVVDKGASAQSFIERMTNFDKNLPNEKVLPKHSLLYEYFTVYNELTKVKYVTEGMRKPAFLSGEQKKAIVDLLFKTNRKVTVKQLKEDYFKKIECFDSVEISGVEDRFNASLGTYHDLLKIIKDKDFLDNEENEDILEDIVLTLTLFEDREMIEERLKTYAHLFDDKVMKQLKRRRYTGWGRLSRKLINGIRDKQSGKTILDFLKSDGFANRNFMQLIHDDSLTFKEDIQKAQVSGQGDSLHEHIANLAGSPAIKKGILQTVKVVDELVKVMGRHKPENIVIEMARENQTTQKGQKNSRERMKRIEEGIKELGSQILKEHPVENTQLQNEKLYLYYLQNGRDMYVDQELDINRLSDYDVDHIVPQSFLKDDSIDNKVLTRSDKARGKSDNVPSEEVVKKMKNYWRQLLNAKLITQRKFDNLTKAERGGLSELDKAGFIKRQLVETRQITKHVAQILDSRMNTKYDENDKLIREVKVITLKSKLVSDFRKDFQFYKVREINNYHHAHDAYLNAVVGTALIKKYPKLESEFVYGDYKVYDVRKMIAKSEQEIGKATAKYFFYSNIMNFFKTEITLANGEIRKRPLIETNGETGEIVWDKGRDFATVRKVLSMPQVNIVKKTEVQTGGFSKESILPKRNSDKLIARKKDWDPKKYGGFDSPTVAYSVLVVAKVEKGKSKKLKSVKELLGITIMERSSFEKNPIDFLEAKGYKEVKKDLIIKLPKYSLFELENGRKRMLASAGELQKGNELALPSKYVNFLYLASHYEKLKGSPEDNEQKQLFVEQHKHYLDEIIEQISEFSKRVILADANLDKVLSAYNKHRDKPIREQAENIIHLFTLTNLGAPAAFKYFDTTIDRKRYTSTKEVLDATLIHQSITGLYETRIDLSQLGGDGGGSSGGGPAPGGTLNIEDEHRLHETSKEPDVSLGSTWLSDFPQAWAETGGMGLAVRQAPLIIPLKATSTPVSIKQYPMSQEARLGIKPHIQRLLDQGILVPCQSPWNTPLLPVKKPGTNDYRPVQDLREVNKRVEDIHPTVPNPYNLLSGLPPSHQWYTVLDLKDAFFCLRLHPTSQPLFAFEWRDPEMGISGQLTWTRLPQGFKNSPTLFNEALHRDLADFRIQHPDLILLQYVDDLLLAATSELDCQQGTRALLQTLGNLGYRASAKKAQICQKQVKYLGYLLKEGQRWLTEARKETVMGQPTPKTPRQLREFLGTAGFCRLWIPGFAEMAAPLYPLTKPGTLFNWGPDQQKAYQEIKQALLTAPALGLPDLTKPFELFVDEKQGYAKGVLTQKLGPWRRPVAYLSKKLDPVAAGWPPCLRMVAAIAVLTKDAGKLTMGQPLVILAPHAVEALVKQPPDRWLSNARMTHYQALLLDTDRVQFGPVVALNPATLLPLPEEGLQHNCLDILAEAHGTRPDLTDQPLPDADHTWYTDGSSLLQEGQRKAGAAVTTETEVIWAKALPAGTSAQRAELIALTQALKMAEGKKLNVYTDSRYAFATAHIHGEIYRRRGWLTSEGKEIKNKDEILALLKALFLPKRLSIIHCPGHQKGHSAEARGNRMADQAARKAAITETPDTSTLLAGKRTADGSEFEKRTADGSEFESPKKKAKVE

SEQ ID NO: 7394 - protein, 2094 aa, synthetic construct; identical to SEQ ID NO: 7393

SEQ ID NO: 7395 - protein, 2088 aa, synthetic construct; identical to SEQ ID NO: 4532

SEQ ID NO: 7396 - protein, 2088 aa, synthetic construct
MPAAKRVKLDGGDKKYSIGLDIGTNSVGWAVITDEYKVPSKKFKVLGNTDRHSIKKNLIGALLFDSGETAEATRLKRTARRRYTRRKNRICYLQEIFSNEMAKVDDSFFHRLEESFLVEEDKKHERHPIFGNIVDEVAYHEKYPTIYHLRKKLVDSTDKADLRLIYLALAHMIKFRGHFLIEGDLNPDNSDVDKLFIQLVQTYNQLFEENPINASGVDAKAILSARLSKSRRLENLIAQLPGEKKNGLFGNLIALSLGLTPNFKSNFDLAEDAKLQLSKDTYDDDLDNLLAQIGDQYADLFLAAKNLSDAILLSDILRVNTEITKAPLSASMIKRYDEHHQDLTLLKALVRQQLPEKYKEIFFDQSKNGYAGYIDGGASQEEFYKFIKPILEKMDGTEELLVKLNREDLLRKQRTFDNGSIPHQIHLGELHAILRRQEDFYPFLKDNREKIEKILTFRIPYYVGPLARGNSRFAWMTRKSEETITPWNFEEVVDKGASAQSFIERMTNFDKNLPNEKVLPKHSLLYEYFTVYNELTKVKYVTEGMRKPAFLSGEQKKAIVDLLFKTNRKVTVKQLKEDYFKKIECFDSVEISGVEDRFNASLGTYHDLLKIIKDKDFLDNEENEDILEDIVLTLTLFEDREMIEERLKTYAHLFDDKVMKQLKRRRYTGWGRLSRKLINGIRDKQSGKTILDFLKSDGFANRNFMQLIHDDSLTFKEDIQKAQVSGQGDSLHEHIANLAGSPAIKKGILQTVKVVDELVKVMGRHKPENIVIEMARENQTTQKGQKNSRERMKRIEEGIKELGSQILKEHPVENTQLQNEKLYLYYLQNGRDMYVDQELDINRLSDYDVDHIVPQSFLKDDSIDNKVLTRSDKARGKSDNVPSEEVVKKMKNYWRQLLNAKLITQRKFDNLTKAERGGLSELDKAGFIKRQLVETRQITKHVAQILDSRMNTKYDENDKLIREVKVITLKSKLVSDFRKDFQFYKVREINNYHHAHDAYLNAVVGTALIKKYPKLESEFVYGDYKVYDVRKMIAKSEQEIGKATAKYFFYSNIMNFFKTEITLANGEIRKRPLIETNGETGEIVWDKGRDFATVRKVLSMPQVNIVKKTEVQTGGFSKESILPKRNSDKLIARKKDWDPKKYGGFDSPTVAYSVLVVAKVEKGKSKKLKSVKELLGITIMERSSFEKNPIDFLEAKGYKEVKKDLIIKLPKYSLFELENGRKRMLASAGELQKGNELALPSKYVNFLYLASHYEKLKGSPEDNEQKQLFVEQHKHYLDEIIEQISEFSKRVILADANLDKVLSAYNKHRDKPIREQAENIIHLFTLTNLGAPAAFKYFDTTIDRKRYTSTKEVLDATLIHQSITGLYETRIDLSQLGGDGGGSSGGGPAPGGTLQLDDEYRLYSPLVKPDQNIQFWLEQFPQAWAETAGMGLAKQVPPQVIQLKASATPVSVRQYPLSKEAQEGIRPHVQRLIQQGILVPVQSPWNTPLLPVRKPGTNDYRPVQDLREVNKRVQDIHPTVPNPYNLLCALPPQRSWYTVLDLKDAFFCLRLHPTSQPLFAFEWRDPGTGRTGQLTWTRLPQGFKNSPTIFDEALHRDLANFRIQHPQVTLLQYVDDLLLAGATKQDCLEGTKALLLELSDLGYRASAKKAQICRREVTYLGYSLRDGQRWLTEARKKTVVQIPAPTTAKQVREFLGTAGFCRLWIPGFATLAAPLYPLTKEKGEFSWAPEHQKAFDAIKKALLSAPALALPDVTKPFTLYVDERKGVARGVLTQTLGPWRRPVAYLSKKLDPVASGWPVCLKAIAAVAILVKDADKLTLGQNITVIAPHALENIVRQPPDRWMTNARMTHYQSLLLTERVTFAPPAALNPATLLPEETDEPVTHDCHQLLIEETGVRKDLTDIPLTGEVLTWFTDGSSYVVEGKRMAGAAVVDGTRTIWASSLPEGTSAQKAELMALTQALRLAEGKSINIYTDSRYAFATAHVHGAIYKQRGLLTSAGREIKNKEEILSLLEALHLPKRLAIIHCPGHQKAKDPISRGNQMADRVAKQAAQGVNLLAGKRTADGSEFEKRTADGSEFESPKKKAKVE

SEQ ID NO: 7397 - protein, 2088 aa, synthetic construct; identical to SEQ ID NO: 4532

SEQ ID NO: 7398 - protein, 2085 aa, synthetic construct
MPAAKRVKLDGGDKKYSIGLDIGTNSVGWAVITDEYKVPSKKFKVLGNTDRHSIKKNLIGALLFDSGETAEATRLKRTARRRYTRRKNRICYLQEIFSNEMAKVDDSFFHRLEESFLVEEDKKHERHPIFGNIVDEVAYHEKYPTIYHLRKKLVDSTDKADLRLIYLALAHMIKFRGHFLIEGDLNPDNSDVDKLFIQLVQTYNQLFEENPINASGVDAKAILSARLSKSRRLENLIAQLPGEKKNGLFGNLIALSLGLTPNFKSNFDLAEDAKLQLSKDTYDDDLDNLLAQIGDQYADLFLAAKNLSDAILLSDILRVNTEITKAPLSASMIKRYDEHHQDLTLLKALVRQQLPEKYKEIFFDQSKNGYAGYIDGGASQEEFYKFIKPILEKMDGTEELLVKLNREDLLRKQRTFDNGSIPHQIHLGELHAILRRQEDFYPFLKDNREKIEKILTFRIPYYVGPLARGNSRFAWMTRKSEETITPWNFEEVVDKGASAQSFIERMTNFDKNLPNEKVLPKHSLLYEYFTVYNELTKVKYVTEGMRKPAFLSGEQKKAIVDLLFKTNRKVTVKQLKEDYFKKIECFDSVEISGVEDRFNASLGTYHDLLKIIKDKDFLDNEENEDILEDIVLTLTLFEDREMIEERLKTYAHLFDDKVMKQLKRRRYTGWGRLSRKLINGIRDKQSGKTILDFLKSDGFANRNFMQLIHDDSLTFKEDIQKAQVSGQGDSLHEHIANLAGSPAIKKGILQTVKVVDELVKVMGRHKPENIVIEMARENQTTQKGQKNSRERMKRIEEGIKELGSQILKEHPVENTQLQNEKLYLYYLQNGRDMYVDQELDINRLSDYDVDHIVPQSFLKDDSIDNKVLTRSDKARGKSDNVPSEEVVKKMKNYWRQLLNAKLITQRKFDNLTKAERGGLSELDKAGFIKRQLVETRQITKHVAQILDSRMNTKYDENDKLIREVKVITLKSKLVSDFRKDFQFYKVREINNYHHAHDAYLNAVVGTALIKKYPKLESEFVYGDYKVYDVRKMIAKSEQEIGKATAKYFFYSNIMNFFKTEITLANGEIRKRPLIETNGETGEIVWDKGRDFATVRKVLSMPQVNIVKKTEVQTGGFSKESILPKRNSDKLIARKKDWDPKKYGGFDSPTVAYSVLVVAKVEKGKSKKLKSVKELLGITIMERSSFEKNPIDFLEAKGYKEVKKDLIIKLPKYSLFELENGRKRMLASAGELQKGNELALPSKYVNFLYLASHYEKLKGSPEDNEQKQLFVEQHKHYLDEIIEQISEFSKRVILADANLDKVLSAYNKHRDKPIREQAENIIHLFTLTNLGAPAAFKYFDTTIDRKRYTSTKEVLDATLIHQSITGLYETRIDLSQLGGDGGGSSGGGPAPGGIPWLMKKPLQLTTLVPLQEYEERLLKQTMLTGSYKEKLQSLFLKYDALWQHWENQVGHRRIKPHHIATGTVNPRPQKQYPINPKAKASIQTVINDLLKQGVLIQQNSIMNTPVYPVPKPDGKWRMVLDYREVNKTIPLIAAQNQHSAGILSSIFRGKYKTTLDLSNGFWAHSITPESYWLTAFTWLGQQYCWTRLPQGFLNSPALFNADVVDLLKEVPNVQVYVDDIYISHDDPREHLEQLEKVFSLLLNAGYVVSLKKSEIAQHEVEFLGFNITKEGRGLTETFKQKLLNITPPRDLKQLQSILGKLNFARNFIPNFSELVKPLYNIIATAPGKYITWTTDNSQQLQNIISMLNSAENLEERNPEVRLIMKVNTSPSAGYIRFYNEFAKRPIMYLNYVYTKAEVKFTNTEKLLTTIHKGLIKALDLGMGQEILVYSPIVSMTKIQKTPLPERKALPIRWITWMSYLEDPRIQFHYDKTLPELQQVPTVTDDIIAKIKHPSEFSMVFYTDGSAIKHPNVNKSHNAGMGIAQVQFKPEFTVINTWSIPLGDHTAQLAEVAAVEFACKKALKIDGPVLIVTDSFYVAESVNKELPYWQSNGFFNNKKKPLKHVSKWKSIADCIQLKPDIIIIHEKGHQPTASTFHTEGNNLADKLATQGSYVVNAGKRTADGSEFEKRTADGSEFESPKKKAKVE

SEQ ID NO: 7399 - protein, 2174 aa, synthetic construct
MPAAKRVKLDGGDKKYSIGLDIGTNSVGWAVITDEYKVPSKKFKVLGNTDRHSIKKNLIGALLFDSGETAEATRLKRTARRRYTRRKNRICYLQEIFSNEMAKVDDSFFHRLEESFLVEEDKKHERHPIFGNIVDEVAYHEKYPTIYHLRKKLVDSTDKADLRLIYLALAHMIKFRGHFLIEGDLNPDNSDVDKLFIQLVQTYNQLFEENPINASGVDAKAILSARLSKSRRLENLIAQLPGEKKNGLFGNLIALSLGLTPNFKSNFDLAEDAKLQLSKDTYDDDLDNLLAQIGDQYADLFLAAKNLSDAILLSDILRVNTEITKAPLSASMIKRYDEHHQDLTLLKALVRQQLPEKYKEIFFDQSKNGYAGYIDGGASQEEFYKFIKPILEKMDGTEELLVKLNREDLLRKQRTFDNGSIPHQIHLGELHAILRRQEDFYPFLKDNREKIEKILTFRIPYYVGPLARGNSRFAWMTRKSEETITPWNFEEVVDKGASAQSFIERMTNFDKNLPNEKVLPKHSLLYEYFTVYNELTKVKYVTEGMRKPAFLSGEQKKAIVDLLFKTNRKVTVKQLKEDYFKKIECFDSVEISGVEDRFNASLGTYHDLLKIIKDKDFLDNEENEDILEDIVLTLTLFEDREMIEERLKTYAHLFDDKVMKQLKRRRYTGWGRLSRKLINGIRDKQSGKTILDFLKSDGFANRNFMQLIHDDSLTFKEDIQKAQVSGQGDSLHEHIANLAGSPAIKKGILQTVKVVDELVKVMGRHKPENIVIEMARENQTTQKGQKNSRERMKRIEEGIKELGSQILKEHPVENTQLQNEKLYLYYLQNGRDMYVDQELDINRLSDYDVDHIVPQSFLKDDSIDNKVLTRSDKARGKSDNVPSEEVVKKMKNYWRQLLNAKLITQRKFDNLTKAERGGLSELDKAGFIKRQLVETRQITKHVAQILDSRMNTKYDENDKLIREVKVITLKSKLVSDFRKDFQFYKVREINNYHHAHDAYLNAVVGTALIKKYPKLESEFVYGDYKVYDVRKMIAKSEQEIGKATAKYFFYSNIMNFFKTEITLANGEIRKRPLIETNGETGEIVWDKGRDFATVRKVLSMPQVNIVKKTEVQTGGFSKESILPKRNSDKLIARKKDWDPKKYGGFDSPTVAYSVLVVAKVEKGKSKKLKSVKELLGITIMERSSFEKNPIDFLEAKGYKEVKKDLIIKLPKYSLFELENGRKRMLASAGELQKGNELALPSKYVNFLYLASHYEKLKGSPEDNEQKQLFVEQHKHYLDEIIEQISEFSKRVILADANLDKVLSAYNKHRDKPIREQAENIIHLFTLTNLGAPAAFKYFDTTIDRKRYTSTKEVLDATLIHQSITGLYETRIDLSQLGGDGGGSSGGGPAPGGMDPLQLLQPLEAEIKGTKLKAHWNSGATITCVPQAFLEEEVPIKNIWIKTIHGEKEQPVYYLTFKIQGRKVEAEVISSPYDYILVSPSDIPWLMKKPLQLTTLVPLQEYEERLLKQTMLTGSYKEKLQSLFLKYDALWQHWENQVGHRRIKPHHIATGTVNPRPQKQYPINPKAKASIQTVINDLLKQGVLIQQNSIMNTPVYPVPKPDGKWRMVLDYREVNKTIPLIAAQNQHSAGILSSIFRGKYKTTLDLSNGFWAHSITPESYWLTAFTWLGQQYCWTRLPQGFLNSPALFNADVVDLLKEVPNVQVYVDDIYISHDDPREHLEQLEKVFSLLLNAGYVVSLKKSEIAQHEVEFLGFNITKEGRGLTETFKQKLLNITPPRDLKQLQSILGLLNFARNFIPNFSELVKPLYNIIATAPGKYITWTTDNSQQLQNIISMLNSAENLEERNPEVRLIMKVNTSPSAGYIRFYNEFAKRPIMYLNYVYTKAEVKFTNTEKLLTTIHKGLIKALDLGMGQEILVYSPIVSMTKIQKTPLPERKALPIRWITWMSYLEDPRIQFHYDKTLPELQQVPTVTDDIIAKIKHPSEFSMVFYTDGSAIKHPNVNKSHNAGMGIAQVQFKPEFTVINTWSIPLGDHTAQLAEVAAVEFACKKALKIDGPVLIVTDSFYVAESVNKELPYWQSNGFFNNKKKPLKHVSKWKSIADCIQLKPDIIIIHEKGHQPTASTFHTEGNNLADKLATQGSYVVNAGKRTADGSEFEKRTADGSEFESPKKKAKVE

SEQ ID NO: 7400 - protein, 2092 aa, synthetic construct
MPAAKRVKLDGGDKKYSIGLDIGTNSVGWAVITDEYKVPSKKFKVLGNTDRHSIKKNLIGALLFDSGETAEATRLKRTARRRYTRRKNRICYLQEIFSNEMAKVDDSFFHRLEESFLVEEDKKHERHPIFGNIVDEVAYHEKYPTIYHLRKKLVDSTDKADLRLIYLALAHMIKFRGHFLIEGDLNPDNSDVDKLFIQLVQTYNQLFEENPINASGVDAKAILSARLSKSRRLENLIAQLPGEKKNGLFGNLIALSLGLTPNFKSNFDLAEDAKLQLSKDTYDDDLDNLLAQIGDQYADLFLAAKNLSDAILLSDILRVNTEITKAPLSASMIKRYDEHHQDLTLLKALVRQQLPEKYKEIFFDQSKNGYAGYIDGGASQEEFYKFIKPILEKMDGTEELLVKLNREDLLRKQRTFDNGSIPHQIHLGELHAILRRQEDFYPFLKDNREKIEKILTFRIPYYVGPLARGNSRFAWMTRKSEETITPWNFEEVVDKGASAQSFIERMTNFDKNLPNEKVLPKHSLLYEYFTVYNELTKVKYVTEGMRKPAFLSGEQKKAIVDLLFKTNRKVTVKQLKEDYFKKIECFDSVEISGVEDRFNASLGTYHDLLKIIKDKDFLDNEENEDILEDIVLTLTLFEDREMIEERLKTYAHLFDDKVMKQLKRRRYTGWGRLSRKLINGIRDKQSGKTILDFLKSDGFANRNFMQLIHDDSLTFKEDIQKAQVSGQGDSLHEHIANLAGSPAIKKGILQTVKVVDELVKVMGRHKPENIVIEMARENQTTQKGQKNSRERMKRIEEGIKELGSQILKEHPVENTQLQNEKLYLYYLQNGRDMYVDQELDINRLSDYDVDHIVPQSFLKDDSIDNKVLTRSDKARGKSDNVPSEEVVKKMKNYWRQLLNAKLITQRKFDNLTKAERGGLSELDKAGFIKRQLVETRQITKHVAQILDSRMNTKYDENDKLIREVKVITLKSKLVSDFRKDFQFYKVREINNYHHAHDAYLNAVVGTALIKKYPKLESEFVYGDYKVYDVRKMIAKSEQEIGKATAKYFFYSNIMNFFKTEITLANGEIRKRPLIETNGETGEIVWDKGRDFATVRKVLSMPQVNIVKKTEVQTGGFSKESILPKRNSDKLIARKKDWDPKKYGGFDSPTVAYSVLVVAKVEKGKSKKLKSVKELLGITIMERSSFEKNPIDFLEAKGYKEVKKDLIIKLPKYSLFELENGRKRMLASAGELQKGNELALPSKYVNFLYLASHYEKLKGSPEDNEQKQLFVEQHKHYLDEIIEQISEFSKRVILADANLDKVLSAYNKHRDKPIREQAENIIHLFTLTNLGAPAAFKYFDTTIDRKRYTSTKEVLDATLIHQSITGLYETRIDLSQLGGDGGGSSGGGPAPGGVLNLEEEYRLHEKPVPSSIDPSWLQLFPTVWAERAGMGLANQVPPVVVELRSGASPVAVRQYPMSKEAREGIRPHIQRFLDLGVLVPCQSPWNTPLLPVKKPGTNDYRPVQDLREINKRVQDIHPTVPNPYNLLSSLPPSHTWYSVLDLKDAFFCLKLHPNSQPLFAFEWRDPEKGNTGQLTWTRLPQGFKNSPTLFNEALHRDLAPFRALNPQVVLLQYVDDLLVAAPTYRDCKEGTQKLLQELSKLGYRVSAKKAQLCQKEVTYLGYLLKEGKRWLTPARKATVMKIPPPTTPRQVREFLGKAGFCRLFIPGFASLAAPLYPLTKPSIPFIWTEEHQKAFDRIKEALLSAPALALPDLTKPFTLYVDERAGVARGVLTQTLGPWRRPVAYLSKKLDPVASGWPTCLKAVAAVALLLKDADKLTLGQNVTVIASHSLESIVRQPPDRWMTNARMTHYQSLLLNERVSFAPPAVLNPATLLPVESEATPVHRCSEILAEETGTRRDLKDQPLPGVPAWYTDGSSFIAEGKRRAGAAIVDGKRTVWASSLPEGTSAQKAELVALTQALRLAEGKDINIYTDSRYAFATAHIHGAIYKQRGWLTSAGKDIKNKEEILALLEAIHLPKRVAIIHCPGHQKGNDPVATGNRRADEAAKQAALSTRVLAETTKPAGKRTADGSEFEKRTADGSEFESPKKKAKVE

SEQ ID NO: 7401 - protein, 2094 aa, synthetic construct
MPAAKRVKLDGGDKKYSIGLDIGTNSVGWAVITDEYKVPSKKFKVLGNTDRHSIKKNLIGALLFDSGETAEATRLKRTARRRYTRRKNRICYLQEIFSNEMAKVDDSFFHRLEESFLVEEDKKHERHPIFGNIVDEVAYHEKYPTIYHLRKKLVDSTDKADLRLIYLALAHMIKFRGHFLIEGDLNPDNSDVDKLFIQLVQTYNQLFEENPINASGVDAKAILSARLSKSRRLENLIAQLPGEKKNGLFGNLIALSLGLTPNFKSNFDLAEDAKLQLSKDTYDDDLDNLLAQIGDQYADLFLAAKNLSDAILLSDILRVNTEITKAPLSASMIKRYDEHHQDLTLLKALVRQQLPEKYKEIFFDQSKNGYAGYIDGGASQEEFYKFIKPILEKMDGTEELLVKLNREDLLRKQRTFDNGSIPHQIHLGELHAILRRQEDFYPFLKDNREKIEKILTFRIPYYVGPLARGNSRFAWMTRKSEETITPWNFEEVVDKGASAQSFIERMTNFDKNLPNEKVLPKHSLLYEYFTVYNELTKVKYVTEGMRKPAFLSGEQKKAIVDLLFKTNRKVTVKQLKEDYFKKIECFDSVEISGVEDRFNASLGTYHDLLKIIKDKDFLDNEENEDILEDIVLTLTLFEDREMIEERLKTYAHLFDDKVMKQLKRRRYTGWGRLSRKLINGIRDKQSGKTILDFLKSDGFANRNFMQLIHDDSLTFKEDIQKAQVSGQGDSLHEHIANLAGSPAIKKGILQTVKVVDELVKVMGRHKPENIVIEMARENQTTQKGQKNSRERMKRIEEGIKELGSQILKEHPVENTQLQNEKLYLYYLQNGRDMYVDQELDINRLSDYDVDHIVPQSFLKDDSIDNKVLTRSDKARGKSDNVPSEEVVKKMKNYWRQLLNAKLITQRKFDNLTKAERGGLSELDKAGFIKRQLVETRQITKHVAQILDSRMNTKYDENDKLIREVKVITLKSKLVSDFRKDFQFYKVREINNYHHAHDAYLNAVVGTALIKKYPKLESEFVYGDYKVYDVRKMIAKSEQEIGKATAKYFFYSNIMNFFKTEITLANGEIRKRPLIETNGETGEIVWDKGRDFATVRKVLSMPQVNIVKKTEVQTGGFSKESILPKRNSDKLIARKKDWDPKKYGGFDSPTVAYSVLVVAKVEKGKSKKLKSVKELLGITIMERSSFEKNPIDFLEAKGYKEVKKDLIIKLPKYSLFELENGRKRMLASAGELQKGNELALPSKYVNFLYLASHYEKLKGSPEDNEQKQLFVEQHKHYLDEIIEQISEFSKRVILADANLDKVLSAYNKHRDKPIREQAENIIHLFTLTNLGAPAAFKYFDTTIDRKRYTSTKEVLDATLIHQSITGLYETRIDLSQLGGDGGGSSGGGPAPGGTLNIEDEYRLHETSKEPDVPLGSTWLSDFPQAWAETGGMGLAVRQAPLIIPLKATSTPVSIKQYPMSQEARLGIKPHIQRLLDQGILVPCQSPWNTPLLPVKKPGTNDYRPVQDLREVNKRVEDIHPTVPNPYNLLSGLPPSHQWYTVLDLKDAFFCLRLHPTSQPLFAFEWRDPEMGISGQLTWTRLPQGFKNSPTLFNEALHRDLADFRIQHPDLILLQYVDDLLLAATSEQDCQRGTRALLQTLGNLGYRASAKKAQICQKQVKYLGYLLKEGQRWLTEARKETVMGQPTPKTPRQLREFLGTAGFCRLWIPGFAEMAAPLYPLTKPGTLFNWGPDQQKAYQEIKQALLTAPALGLPDLTKPFELFVDEKQGYAKGVLTQKLGPWRRPVAYLSKKLDPVAAGWPPCLRMVAAIAVLTKDAGKLTMGQPLVILAPHAVEALVKQPPDRWLSNARMTHYQAMLLDTDRVQFGPVVALNPATLLPLPEKEAPHDCLEILAETHGTRPDLTDQPIPDADYTWYTDGSSFLQEGQRRAGAAVTTETEVIWARALPAGTSAQRAELIALTQALKMAEGKKLNVYTDSRYAFATAHVHGEIYRRRGWLTSEGREIKNKNEILALLKALFLPKRLSIIHCPGHQKGNSAEARGNRMADQAAREAAMKAVLETSTLLAGKRTADGSEFEKRTADGSEFESPKKKAKVE

SEQ ID NO: 7402 - protein, 2096 aa, synthetic construct
MPAAKRVKLDGGDKKYSIGLDIGTNSVGWAVITDEYKVPSKKFKVLGNTDRHSIKKNLIGALLFDSGETAEATRLKRTARRRYTRRKNRICYLQEIFSNEMAKVDDSFFHRLEESFLVEEDKKHERHPIFGNIVDEVAYHEKYPTIYHLRKKLVDSTDKADLRLIYLALAHMIKFRGHFLIEGDLNPDNSDVDKLFIQLVQTYNQLFEENPINASGVDAKAILSARLSKSRRLENLIAQLPGEKKNGLFGNLIALSLGLTPNFKSNFDLAEDAKLQLSKDTYDDDLDNLLAQIGDQYADLFLAAKNLSDAILLSDILRVNTEITKAPLSASMIKRYDEHHQDLTLLKALVRQQLPEKYKEIFFDQSKNGYAGYIDGGASQEEFYKFIKPILEKMDGTEELLVKLNREDLLRKQRTFDNGSIPHQIHLGELHAILRRQEDFYPFLKDNREKIEKILTFRIPYYVGPLARGNSRFAWMTRKSEETITPWNFEEVVDKGASAQSFIERMTNFDKNLPNEKVLPKHSLLYEYFTVYNELTKVKYVTEGMRKPAFLSGEQKKAIVDLLFKTNRKVTVKQLKEDYFKKIECFDSVEISGVEDRFNASLGTYHDLLKIIKDKDFLDNEENEDILEDIVLTLTLFEDREMIEERLKTYAHLFDDKVMKQLKRRRYTGWGRLSRKLINGIRDKQSGKTILDFLKSDGFANRNFMQLIHDDSLTFKEDIQKAQVSGQGDSLHEHIANLAGSPAIKKGILQTVKVVDELVKVMGRHKPENIVIEMARENQTTQKGQKNSRERMKRIEEGIKELGSQILKEHPVENTQLQNEKLYLYYLQNGRDMYVDQELDINRLSDYDVDHIVPQSFLKDDSIDNKVLTRSDKARGKSDNVPSEEVVKKMKNYWRQLLNAKLITQRKFDNLTKAERGGLSELDKAGFIKRQLVETRQITKHVAQILDSRMNTKYDENDKLIREVKVITLKSKLVSDFRKDFQFYKVREINNYHHAHDAYLNAVVGTALIKKYPKLESEFVYGDYKVYDVRKMIAKSEQEIGKATAKYFFYSNIMNFFKTEITLANGEIRKRPLIETNGETGEIVWDKGRDFATVRKVLSMPQVNIVKKTEVQTGGFSKESILPKRNSDKLIARKKDWDPKKYGGFDSPTVAYSVLVVAKVEKGKSKKLKSVKELLGITIMERSSFEKNPIDFLEAKGYKEVKKDLIIKLPKYSLFELENGRKRMLASAGELQKGNELALPSKYVNFLYLASHYEKLKGSPEDNEQKQLFVEQHKHYLDEIIEQISEFSKRVILADANLDKVLSAYNKHRDKPIREQAENIIHLFTLTNLGAPAAFKYFDTTIDRKRYTSTKEVLDATLIHQSITGLYETRIDLSQLGGDGGGSSPAPGGGGGTAPLEEEYRLFLEAPIQNVTLLEQWKREIPKVWAEINPPGLASTQAPIHVQLLSTALPVRVRQYPITLEAKRSLRETIRKFRAAGILRPVHSPWNTPLLPVRKSGTSEYRMVQDLREVNKRVETIHPTVPNPYTLLSLLPPDRIWYSVLDLKDAFFCIPLAPESQLIFAFEWADAEEGESGQLTWTRLPQGFKNSPTLFNEALNRDLQGFRLDHPSVSLLQYVDDLLIAADTQAACLSATRDLLMTLAELGYRVSGKKAQLCQEEVTYLGFKIHKGSRSLSNSRTQAILQIPVPKTKRQVREFLGTIGYCRLWIPGFAELAQPLYAATRPGNDPLVWGEKEEEAFQSLKLALTQPPALALPSLDKPFQLFVEETSGAAKGVLTQALGPWKRPVAYLSKRLDPVAAGWPRCLRAIAAAALLTREASKLTFGQDIEITSSHNLESLLRSPPDKWLTNARITQYQVLLLDPPRVRFKQTAALNPATLLPETDDTLPIHHCLDTLDSLTSTRPDLTDQPLAQAEATLFTDGSSYIRDGKRYAGAAVVTLDSVIWAEPLPIGTSAQKAELIALTKALEWSKDKSVNIYTDSRYAFATLHVHGMIYRERGWLTAGGKAIKNAPEILALLTAVWLPKRVAVMHCKGHQKDDAPTSTGNRRADEVAREVAIRPLSTQATISAGKRTADGSEFEKRTADGSEFESPKKKAKVE

SEQ ID NO: 7403 - protein, 2096 aa, synthetic construct
MPAAKRVKLDGGDKKYSIGLDIGTNSVGWAVITDEYKVPSKKFKVLGNTDRHSIKKNLIGALLFDSGETAEATRLKRTARRRYTRRKNRICYLQEIFSNEMAKVDDSFFHRLEESFLVEEDKKHERHPIFGNIVDEVAYHEKYPTIYHLRKKLVDSTDKADLRLIYLALAHMIKFRGHFLIEGDLNPDNSDVDKLFIQLVQTYNQLFEENPINASGVDAKAILSARLSKSRRLENLIAQLPGEKKNGLFGNLIALSLGLTPNFKSNFDLAEDAKLQLSKDTYDDDLDNLLAQIGDQYADLFLAAKNLSDAILLSDILRVNTEITKAPLSASMIKRYDEHHQDLTLLKALVRQQLPEKYKEIFFDQSKNGYAGYIDGGASQEEFYKFIKPILEKMDGTEELLVKLNREDLLRKQRTFDNGSIPHQIHLGELHAILRRQEDFYPFLKDNREKIEKILTFRIPYYVGPLARGNSRFAWMTRKSEETITPWNFEEVVDKGASAQSFIERMTNFDKNLPNEKVLPKHSLLYEYFTVYNELTKVKYVTEGMRKPAFLSGEQKKAIVDLLFKTNRKVTVKQLKEDYFKKIECFDSVEISGVEDRFNASLGTYHDLLKIIKDKDFLDNEENEDILEDIVLTLTLFEDREMIEERLKTYAHLFDDKVMKQLKRRRYTGWGRLSRKLINGIRDKQSGKTILDFLKSDGFANRNFMQLIHDDSLTFKEDIQKAQVSGQGDSLHEHIANLAGSPAIKKGILQTVKVVDELVKVMGRHKPENIVIEMARENQTTQKGQKNSRERMKRIEEGIKELGSQILKEHPVENTQLQNEKLYLYYLQNGRDMYVDQELDINRLSDYDVDHIVPQSFLKDDSIDNKVLTRSDKARGKSDNVPSEEVVKKMKNYWRQLLNAKLITQRKFDNLTKAERGGLSELDKAGFIKRQLVETRQITKHVAQILDSRMNTKYDENDKLIREVKVITLKSKLVSDFRKDFQFYKVREINNYHHAHDAYLNAVVGTALIKKYPKLESEFVYGDYKVYDVRKMIAKSEQEIGKATAKYFFYSNIMNFFKTEITLANGEIRKRPLIETNGETGEIVWDKGRDFATVRKVLSMPQVNIVKKTEVQTGGFSKESILPKRNSDKLIARKKDWDPKKYGGFDSPTVAYSVLVVAKVEKGKSKKLKSVKELLGITIMERSSFEKNPIDFLEAKGYKEVKKDLIIKLPKYSLFELENGRKRMLASAGELQKGNELALPSKYVNFLYLASHYEKLKGSPEDNEQKQLFVEQHKHYLDEIIEQISEFSKRVILADANLDKVLSAYNKHRDKPIREQAENIIHLFTLTNLGAPAAFKYFDTTIDRKRYTSTKEVLDATLIHQSITGLYETRIDLSQLGGDGGGSSPAPGGGGGTAPLEEEYRLFLEAPIQNVTLLEQWKREIPKVWAEINPPGLASTQAPIHVQLLSTALPVRVRQYPITLEAKRSLRETIRKFRAAGILRPVHSPWNTPLLPVRKSGTSEYRMVQDLREVNKRVETIHPTVPNPYTLLSLLPPDRIWYSVLDLKDAFFCIPLAPESQLIFAFEWADAEEGESGQLTWTRLPQGFKNSPTLFNEALNRDLQGFRLDHPSVSLLQYVDDLLIAADTQAACLSATRDLLMTLAELGYRVSGKKAQLCQEEVTYLGFKIHKGSRSLSNSRTQAILQIPVPKTKRQVREFLGKIGYCRLFIPGFAELAQPLYAATRPGNDPLVWGEKEEEAFQSLKLALTQPPALALPSLDKPFQLFVEETSGAAKGVLTQALGPWKRPVAYLSKRLDPVAAGWPRCLRAIAAAALLTREASKLTFGQDIEITSSHNLESLLRSPPDKWLTNARITQYQVLLLDPPRVRFKQTAALNPATLLPETDDTLPIHHCLDTLDSLTSTRPDLTDQPLAQAEATLFTDGSSYIRDGKRYAGAAVVTLDSVIWAEPLPIGTSAQKAELIALTKALEWSKDKSVNIYTDSRYAFATLHVHGMIYRERGWLTAGGKAIKNAPEILALLTAVWLPKRVAVMHCKGHQKDDAPTSTGNRRADEVAREVAIRPLSTQATISAGKRTADGSEFEKRTADGSEFESPKKKAKVE

SEQ ID NO: 7404 - protein, 2092 aa, synthetic construct
MPAAKRVKLDGGDKKYSIGLDIGTNSVGWAVITDEYKVPSKKFKVLGNTDRHSIKKNLIGALLFDSGETAEATRLKRTARRRYTRRKNRICYLQEIFSNEMAKVDDSFFHRLEESFLVEEDKKHERHPIFGNIVDEVAYHEKYPTIYHLRKKLVDSTDKADLRLIYLALAHMIKFRGHFLIEGDLNPDNSDVDKLFIQLVQTYNQLFEENPINASGVDAKAILSARLSKSRRLENLIAQLPGEKKNGLFGNLIALSLGLTPNFKSNFDLAEDAKLQLSKDTYDDDLDNLLAQIGDQYADLFLAAKNLSDAILLSDILRVNTEITKAPLSASMIKRYDEHHQDLTLLKALVRQQLPEKYKEIFFDQSKNGYAGYIDGGASQEEFYKFIKPILEKMDGTEELLVKLNREDLLRKQRTFDNGSIPHQIHLGELHAILRRQEDFYPFLKDNREKIEKILTFRIPYYVGPLARGNSRFAWMTRKSEETITPWNFEEVVDKGASAQSFIERMTNFDKNLPNEKVLPKHSLLYEYFTVYNELTKVKYVTEGMRKPAFLSGEQKKAIVDLLFKTNRKVTVKQLKEDYFKKIECFDSVEISGVEDRFNASLGTYHDLLKIIKDKDFLDNEENEDILEDIVLTLTLFEDREMIEERLKTYAHLFDDKVMKQLKRRRYTGWGRLSRKLINGIRDKQSGKTILDFLKSDGFANRNFMQLIHDDSLTFKEDIQKAQVSGQGDSLHEHIANLAGSPAIKKGILQTVKVVDELVKVMGRHKPENIVIEMARENQTTQKGQKNSRERMKRIEEGIKELGSQILKEHPVENTQLQNEKLYLYYLQNGRDMYVDQELDINRLSDYDVDHIVPQSFLKDDSIDNKVLTRSDKARGKSDNVPSEEVVKKMKNYWRQLLNAKLITQRKFDNLTKAERGGLSELDKAGFIKRQLVETRQITKHVAQILDSRMNTKYDENDKLIREVKVITLKSKLVSDFRKDFQFYKVREINNYHHAHDAYLNAVVGTALIKKYPKLESEFVYGDYKVYDVRKMIAKSEQEIGKATAKYFFYSNIMNFFKTEITLANGEIRKRPLIETNGETGEIVWDKGRDFATVRKVLSMPQVNIVKKTEVQTGGFSKESILPKRNSDKLIARKKDWDPKKYGGFDSPTVAYSVLVVAKVEKGKSKKLKSVKELLGITIMERSSFEKNPIDFLEAKGYKEVKKDLIIKLPKYSLFELENGRKRMLASAGELQKGNELALPSKYVNFLYLASHYEKLKGSPEDNEQKQLFVEQHKHYLDEIIEQISEFSKRVILADANLDKVLSAYNKHRDKPIREQAENIIHLFTLTNLGAPAAFKYFDTTIDRKRYTSTKEVLDATLIHQSITGLYETRIDLSQLGGDGGGSSPAPGGGGGVLNLEEEYRLHEKPVPSSIDPSWLQLFPTVWAERAGMGLANQVPPVVVELRSGASPVAVRQYPMSKEAREGIRPHIQKFLDLGVLVPCRSPWNTPLLPVKKPGTNDYRPVQDLREINKRVQDIHPTVPNPYNLLSSLPPSYTWYSVLDLKDAFFCLRLHPNSQPLFAFEWKDPEKGNTGQLTWTRLPQGFKNSPTLFNEALHRDLAPFRALNPQVVLLQYVDDLLVAAPTYEDCKKGTQKLLQELSKLGYRVSAKKAQLCQREVTYLGYLLKEGKRWLTPARKATVMKIPVPTTPRQVREFLGKAGFCRLFIPGFASLAAPLYPLTKPSIPFIWTEEHQQAFDHIKKALLSAPALALPDLTKPFTLYIDERAGVARGVLTQTLGPWRRPVAYLSKKLDPVASGWPTCLKAVAAVALLLKDADKLTLGQNVTVIASHSLESIVRQPPDRWMTNARMTHYQSLLLNERVSFAPPAVLNPATLLPVESEATPVHRCSEILAEETGTRRDLEDQPLPGVPTWYTDGSSFITEGKRRAGAPIVDGKRTVWASSLPEGTSAQKAELVALTQALRLAEGKNINIYTDSRYAFATAHIHGAIYKQRGWLTSAGKDIKNKEEILALLEAIHLPRRVAIIHCPGHQRGSNPVATGNRRADEAAKQAALSTRVLAGTTKPAGKRTADGSEFEKRTADGSEFESPKKKAKVE

SEQ ID NO: 7405 - protein, 2125 aa, synthetic construct
MPAAKRVKLDGGDKKYSIGLDIGTNSVGWAVITDEYKVPSKKFKVLGNTDRHSIKKNLIGALLFDSGETAEATRLKRTARRRYTRRKNRICYLQEIFSNEMAKVDDSFFHRLEESFLVEEDKKHERHPIFGNIVDEVAYHEKYPTIYHLRKKLVDSTDKADLRLIYLALAHMIKFRGHFLIEGDLNPDNSDVDKLFIQLVQTYNQLFEENPINASGVDAKAILSARLSKSRRLENLIAQLPGEKKNGLFGNLIALSLGLTPNFKSNFDLAEDAKLQLSKDTYDDDLDNLLAQIGDQYADLFLAAKNLSDAILLSDILRVNTEITKAPLSASMIKRYDEHHQDLTLLKALVRQQLPEKYKEIFFDQSKNGYAGYIDGGASQEEFYKFIKPILEKMDGTEELLVKLNREDLLRKQRTFDNGSIPHQIHLGELHAILRRQEDFYPFLKDNREKIEKILTFRIPYYVGPLARGNSRFAWMTRKSEETITPWNFEEVVDKGASAQSFIERMTNFDKNLPNEKVLPKHSLLYEYFTVYNELTKVKYVTEGMRKPAFLSGEQKKAIVDLLFKTNRKVTVKQLKEDYFKKIECFDSVEISGVEDRFNASLGTYHDLLKIIKDKDFLDNEENEDILEDIVLTLTLFEDREMIEERLKTYAHLFDDKVMKQLKRRRYTGWGRLSRKLINGIRDKQSGKTILDFLKSDGFANRNFMQLIHDDSLTFKEDIQKAQVSGQGDSLHEHIANLAGSPAIKKGILQTVKVVDELVKVMGRHKPENIVIEMARENQTTQKGQKNSRERMKRIEEGIKELGSQILKEHPVENTQLQNEKLYLYYLQNGRDMYVDQELDINRLSDYDVDHIVPQSFLKDDSIDNKVLTRSDKARGKSDNVPSEEVVKKMKNYWRQLLNAKLITQRKFDNLTKAERGGLSELDKAGFIKRQLVETRQITKHVAQILDSRMNTKYDENDKLIREVKVITLKSKLVSDFRKDFQFYKVREINNYHHAHDAYLNAVVGTALIKKYPKLESEFVYGDYKVYDVRKMIAKSEQEIGKATAKYFFYSNIMNFFKTEITLANGEIRKRPLIETNGETGEIVWDKGRDFATVRKVLSMPQVNIVKKTEVQTGGFSKESILPKRNSDKLIARKKDWDPKKYGGFDSPTVAYSVLVVAKVEKGKSKKLKSVKELLGITIMERSSFEKNPIDFLEAKGYKEVKKDLIIKLPKYSLFELENGRKRMLASAGELQKGNELALPSKYVNFLYLASHYEKLKGSPEDNEQKQLFVEQHKHYLDEIIEQISEFSKRVILADANLDKVLSAYNKHRDKPIREQAENIIHLFTLTNLGAPAAFKYFDTTIDRKRYTSTKEVLDATLIHQSITGLYETRIDLSQLGGDGGGSSPAPGGGGGLLGRDLLTKLKAQIQFSTEGPQVTWEDRPAMCLVLNLEEEYRLHEKPVPPSIDPSWLQLFPMVWAEKAGMGLANQVPPVVVELKSDASPVAVRQYPMSKEAREGIRPHIQRFLDLGILVPCQSPWNTPLLPVKKPGTNDYRPVQDLREVNKRVQDIHPTVPNPYNLLSSLPPSHTWYSVLDLKDAFFCLKLHPNSQPLFAFEWRDPEKGNTGQLTWTRLPQGFKNSPTLFDEALHRDLASFRALNPQVVMLQYVDDLLVAAPTYRDCKEGTRRLLQELSKLGYRVSAKKAQLCREEVTYLGYLLKGGKRWLTPARKATVMKIPTPTTPRQVREFLGTAGFCRLWIPGFASLAAPLYPLTREKVPFTWTEAHQEAFGRIKEALLSAPALALPDLTKPFALYVDEKEGVARGVLTQTLGPWRRPVAYLSKKLDPVASGWPTCLKAIAAVALLLKDADKLTLGQNVLVIAPHNLESIVRQPPDRWMTNARMTHYQSLLLNERVSFAPPAILNPATLLPVESDDTPIHICSEILAEETGTRPDLRDQPLPGVPAWYTDGSSFIMDGRRQAGAAIVDNKRTVWASNLPEGTSAQKAELIALTQALRLAEGKSINIYTDSRYAFATAHVHGAIYKQRGLLTSAGKDIKNKEEILALLEAIHLPKRVAIIHCPGHQRGTDPVATGNRKADEAAKQAAQSTRILTETTKNAGKRTADGSEFEKRTADGSEFESPKKKAKVE

SEQ ID NO: 7406 - protein, 2216 aa, synthetic construct
MPAAKRVKLDGGDKKYSIGLDIGTNSVGWAVITDEYKVPSKKFKVLGNTDRHSIKKNLIGALLFDSGETAEATRLKRTARRRYTRRKNRICYLQEIFSNEMAKVDDSFFHRLEESFLVEEDKKHERHPIFGNIVDEVAYHEKYPTIYHLRKKLVDSTDKADLRLIYLALAHMIKFRGHFLIEGDLNPDNSDVDKLFIQLVQTYNQLFEENPINASGVDAKAILSARLSKSRRLENLIAQLPGEKKNGLFGNLIALSLGLTPNFKSNFDLAEDAKLQLSKDTYDDDLDNLLAQIGDQYADLFLAAKNLSDAILLSDILRVNTEITKAPLSASMIKRYDEHHQDLTLLKALVRQQLPEKYKEIFFDQSKNGYAGYIDGGASQEEFYKFIKPILEKMDGTEELLVKLNREDLLRKQRTFDNGSIPHQIHLGELHAILRRQEDFYPFLKDNREKIEKILTFRIPYYVGPLARGNSRFAWMTRKSEETITPWNFEEVVDKGASAQSFIERMTNFDKNLPNEKVLPKHSLLYEYFTVYNELTKVKYVTEGMRKPAFLSGEQKKAIVDLLFKTNRKVTVKQLKEDYFKKIECFDSVEISGVEDRFNASLGTYHDLLKIIKDKDFLDNEENEDILEDIVLTLTLFEDREMIEERLKTYAHLFDDKVMKQLKRRRYTGWGRLSRKLINGIRDKQSGKTILDFLKSDGFANRNFMQLIHDDSLTFKEDIQKAQVSGQGDSLHEHIANLAGSPAIKKGILQTVKVVDELVKVMGRHKPENIVIEMARENQTTQKGQKNSRERMKRIEEGIKELGSQILKEHPVENTQLQNEKLYLYYLQNGRDMYVDQELDINRLSDYDVDHIVPQSFLKDDSIDNKVLTRSDKARGKSDNVPSEEVVKKMKNYWRQLLNAKLITQRKFDNLTKAERGGLSELDKAGFIKRQLVETRQITKHVAQILDSRMNTKYDENDKLIREVKVITLKSKLVSDFRKDFQFYKVREINNYHHAHDAYLNAVVGTALIKKYPKLESEFVYGDYKVYDVRKMIAKSEQEIGKATAKYFFYSNIMNFFKTEITLANGEIRKRPLIETNGETGEIVWDKGRDFATVRKVLSMPQVNIVKKTEVQTGGFSKESILPKRNSDKLIARKKDWDPKKYGGFDSPTVAYSVLVVAKVEKGKSKKLKSVKELLGITIMERSSFEKNPIDFLEAKGYKEVKKDLIIKLPKYSLFELENGRKRMLASAGELQKGNELALPSKYVNFLYLASHYEKLKGSPEDNEQKQLFVEQHKHYLDEIIEQISEFSKRVILADANLDKVLSAYNKHRDKPIREQAENIIHLFTLTNLGAPAAFKYFDTTIDRKRYTSTKEVLDATLIHQSITGLYETRIDLSQLGGDGGGSSPAPGGGGGTLGDQGSRGSDPLPEPRVTLTVEGIPTEFLVNTGAEHSVLTKPMGKMGSKRTVVAGATGSKVYPWTTKRLLKIGQKQVTHSFLVIPECPAPLLGRDLLTKLKAQIQFSTEGPQVTWEDRPAMCLVLNLEEEYRLHEKPVPPSIDPSWLQLFPMVWAEKAGMGLANQVPPVVVELKSDASPVAVRQYPMSKEAREGIRPHIQRFLDLGILVPCQSPWNTPLLPVKKPGTNDYRPVQDLREVNKRVQDIHPTVPNPYNLLSSLPPSHTWYSVLDLKDAFFCLKLHPNSQPLFAFEWRDPEKGNTGQLTWTRLPQGFKNSPTLFNEALHRDLASFRALNPQVVMLQYVDDLLVAAPTYRDCKEGTRRLLQELSKLGYRVSAKKAQLCREEVTYLGYLLKGGKRWLTPARKATVMKIPTPTTPRQVREFLGTAGFCRLWIPGFASLAAPLYPLTRPKVPFTWTEAHQEAFGRIKEALLSAPALALPDLTKPFALYVDEKEGVARGVLTQTLGPWRRPVAYLSKKLDPVASGWPTCLKAIAAVALLLKDADKLTLGQNVLVIAPHNLESIVRQPPDRWMTNARMTHYQSLLLNERVSFAPPAILNPATLLPVESDDTPIHICSEILAEETGTRPDLRDQPLPGVPAWYTDGSSFIMDGRRQAGAAIVDNKRTVWASNLPEGTSAQKAELIALTQALRLAEGKSINIYTDSRYAFATAHVHGAIYKQRGWLTSAGKDIKNKEEILALLEAIHLPKRVAIIHCPGHQRGTDPVATGNRKADEAAKQAAQSTRILTETTKNAGKRTADGSEFEKRTADGSEFESPKKKAKVE

SEQ ID NO: 7407 - protein, 2216 aa, synthetic construct
MPAAKRVKLDGGDKKYSIGLDIGTNSVGWAVITDEYKVPSKKFKVLGNTDRHSIKKNLIGALLFDSGETAEATRLKRTARRRYTRRKNRICYLQEIFSNEMAKVDDSFFHRLEESFLVEEDKKHERHPIFGNIVDEVAYHEKYPTIYHLRKKLVDSTDKADLRLIYLALAHMIKFRGHFLIEGDLNPDNSDVDKLFIQLVQTYNQLFEENPINASGVDAKAILSARLSKSRRLENLIAQLPGEKKNGLFGNLIALSLGLTPNFKSNFDLAEDAKLQLSKDTYDDDLDNLLAQIGDQYADLFLAAKNLSDAILLSDILRVNTEITKAPLSASMIKRYDEHHQDLTLLKALVRQQLPEKYKEIFFDQSKNGYAGYIDGGASQEEFYKFIKPILEKMDGTEELLVKLNREDLLRKQRTFDNGSIPHQIHLGELHAILRRQEDFYPFLKDNREKIEKILTFRIPYYVGPLARGNSRFAWMTRKSEETITPWNFEEVVDKGASAQSFIERMTNFDKNLPNEKVLPKHSLLYEYFTVYNELTKVKYVTEGMRKPAFLSGEQKKAIVDLLFKTNRKVTVKQLKEDYFKKIECFDSVEISGVEDRFNASLGTYHDLLKIIKDKDFLDNEENEDILEDIVLTLTLFEDREMIEERLKTYAHLFDDKVMKQLKRRRYTGWGRLSRKLINGIRDKQSGKTILDFLKSDGFANRNFMQLIHDDSLTFKEDIQKAQVSGQGDSLHEHIANLAGSPAIKKGILQTVKVVDELVKVMGRHKPENIVIEMARENQTTQKGQKNSRERMKRIEEGIKELGSQILKEHPVENTQLQNEKLYLYYLQNGRDMYVDQELDINRLSDYDVDHIVPQSFLKDDSIDNKVLTRSDKARGKSDNVPSEEVVKKMKNYWRQLLNAKLITQRKFDNLTKAERGGLSELDKAGFIKRQLVETRQITKHVAQILDSRMNTKYDENDKLIREVKVITLKSKLVSDFRKDFQFYKVREINNYHHAHDAYLNAVVGTALIKKYPKLESEFVYGDYKVYDVRKMIAKSEQEIGKATAKYFFYSNIMNFFKTEITLANGEIRKRPLIETNGETGEIVWDKGRDFATVRKVLSMPQVNIVKKTEVQTGGFSKESILPKRNSDKLIARKKDWDPKKYGGFDSPTVAYSVLVVAKVEKGKSKKLKSVKELLGITIMERSSFEKNPIDFLEAKGYKEVKKDLIIKLPKYSLFELENGRKRMLASAGELQKGNELALPSKYVNFLYLASHYEKLKGSPEDNEQKQLFVEQHKHYLDEIIEQISEFSKRVILADANLDKVLSAYNKHRDKPIREQAENIIHLFTLTNLGAPAAFKYFDTTIDRKRYTSTKEVLDATLIHQSITGLYETRIDLSQLGGDGGGSSPAPGGGGGTLGDQGSRGSDPLPEPRVTLTVEGIPTEFLVNTGAEHSVLTKPMGKMGSKRTVVAGATGSKVYPWTTKRLLKIGQKQVTHSFLVIPECPAPLLGRDLLTKLKAQIQFSTEGPQVTWEDRPAMCLVLNLEEEYRLHEKPVPPSIDPSWLQLFPMVWAEKAGMGLANQVPPVVVELKSDASPVAVRQYPMSKEAREGIRPHIQRFLDLGILVPCQSPWNTPLLPVKKPGTNDYRPVQDLREVNKRVQDIHPTVPNPYNLLSSLPPSHTWYSVLDLKDAFFCLKLHPNSQPLFAFEWRDPEKGNTGQLTWTRLPQGFKNSPTLFNEALHRDLASFRALNPQVVMLQYVDDLLVAAPTYRDCKEGTRRLLQELSKLGYRVSAKKAQLCREEVTYLGYLLKGGKRWLTPARKATVMKIPTPTTPRQVREFLGKAGFCRLFIPGFASLAAPLYPLTRPKVPFTWTEAHQEAFGRIKEALLSAPALALPDLTKPFALYVDEKEGVARGVLTQTLGPWRRPVAYLSKKLDPVASGWPTCLKAIAAVALLLKDADKLTLGQNVLVIAPHNLESIVRQPPDRWMTNARMTHYQSLLLNERVSFAPPAILNPATLLPVESDDTPIHICSEILAEETGTRPDLRDQPLPGVPAWYTDGSSFIMDGRRQAGAAIVDNKRTVWASNLPEGTSAQKAELIALTQALRLAEGKSINIYTDSRYAFATAHVHGAIYKQRGWLTSAGKDIKNKEEILALLEAIHLPKRVAIIHCPGHQRGTDPVATGNRKADEAAKQAAQSTRILTETTKNAGKRTADGSEFEKRTADGSEFESPKKKAKVE

SEQ ID NO: 7408 - protein, 2094 aa, synthetic construct
MPAAKRVKLDGGDKKYSIGLDIGTNSVGWAVITDEYKVPSKKFKVLGNTDRHSIKKNLIGALLFDSGETAEATRLKRTARRRYTRRKNRICYLQEIFSNEMAKVDDSFFHRLEESFLVEEDKKHERHPIFGNIVDEVAYHEKYPTIYHLRKKLVDSTDKADLRLIYLALAHMIKFRGHFLIEGDLNPDNSDVDKLFIQLVQTYNQLFEENPINASGVDAKAILSARLSKSRRLENLIAQLPGEKKNGLFGNLIALSLGLTPNFKSNFDLAEDAKLQLSKDTYDDDLDNLLAQIGDQYADLFLAAKNLSDAILLSDILRVNTEITKAPLSASMIKRYDEHHQDLTLLKALVRQQLPEKYKEIFFDQSKNGYAGYIDGGASQEEFYKFIKPILEKMDGTEELLVKLNREDLLRKQRTFDNGSIPHQIHLGELHAILRRQEDFYPFLKDNREKIEKILTFRIPYYVGPLARGNSRFAWMTRKSEETITPWNFEEVVDKGASAQSFIERMTNFDKNLPNEKVLPKHSLLYEYFTVYNELTKVKYVTEGMRKPAFLSGEQKKAIVDLLFKTNRKVTVKQLKEDYFKKIECFDSVEISGVEDRFNASLGTYHDLLKIIKDKDFLDNEENEDILEDIVLTLTLFEDREMIEERLKTYAHLFDDKVMKQLKRRRYTGWGRLSRKLINGIRDKQSGKTILDFLKSDGFANRNFMQLIHDDSLTFKEDIQKAQVSGQGDSLHEHIANLAGSPAIKKGILQTVKVVDELVKVMGRHKPENIVIEMARENQTTQKGQKNSRERMKRIEEGIKELGSQILKEHPVENTQLQNEKLYLYYLQNGRDMYVDQELDINRLSDYDVDHIVPQSFLKDDSIDNKVLTRSDKARGKSDNVPSEEVVKKMKNYWRQLLNAKLITQRKFDNLTKAERGGLSELDKAGFIKRQLVETRQITKHVAQILDSRMNTKYDENDKLIREVKVITLKSKLVSDFRKDFQFYKVREINNYHHAHDAYLNAVVGTALIKKYPKLESEFVYGDYKVYDVRKMIAKSEQEIGKATAKYFFYSNIMNFFKTEITLANGEIRKRPLIETNGETGEIVWDKGRDFATVRKVLSMPQVNIVKKTEVQTGGFSKESILPKRNSDKLIARKKDWDPKKYGGFDSPTVAYSVLVVAKVEKGKSKKLKSVKELLGITIMERSSFEKNPIDFLEAKGYKEVKKDLIIKLPKYSLFELENGRKRMLASAGELQKGNELALPSKYVNFLYLASHYEKLKGSPEDNEQKQLFVEQHKHYLDEIIEQISEFSKRVILADANLDKVLSAYNKHRDKPIREQAENIIHLFTLTNLGAPAAFKYFDTTIDRKRYTSTKEVLDATLIHQSITGLYETRIDLSQLGGDGGGSSPAPGGGGGTLNLEDEYRLYETSAEPEVSPGSTWLSDFPQAWAETGGMGLAVRQAPLIIPLKATSTPVSIKQYPMSQEAKLGIKPHIQRLLDQGILVPCQSPWNTPLLPVKKPGTNDYRPVQDLREVNKRVEDIHPTVPNPYNLLSGLPPSHRWYTVLDLKDAFFCLRLHPTSQPLFAFEWRDPGMGISGQLTWTRLPQGFKNSPTLFNEALHRDLADFRIQHPDLILLQYVDDILLAATSELDCQQGTRALLLTLGNLGYRASAKKAQLCQKQVKYLGYLLKEGQRWLTEARKETVMGQPTPKTPRQLREFLGTAGFCRLWIPGFAEMAAPLYPLTKPGTLFNWGPDQQKAYQEIKQALLTAPALGLPDLTKPFELFVDEKQGYAKGVLTQKLGPWRRPVAYLSKKLDPVAAGWPPCLRMVAAIAVLRKDAGKLTMGQPLVILAPHAVEALVKQPPDRWLSNARMTHYQAMLLDTDRVQFGPVVALNPATLLPLPEEGAPHDCLEILAETHGTRPDLTDQPIPDADHTWYTDGSSFLQEGQRKAGAAVTTETEVIWARALPAGTSAQRAELIALTQALKMAEGKRLNVYTDSRYAFATAHIHGEIYRRRGWLTSEGREIKNKSEILALLKALFLPKRLSIIHCLGHQKGDSAEARGNRLADQAAREAAIKTPPDTSTLLAGKRTADGSEFEKRTADGSEFESPKKKAKVE

SEQ ID NO: 7409 - protein, 2094 aa, synthetic construct
MPAAKRVKLDGGDKKYSIGLDIGTNSVGWAVITDEYKVPSKKFKVLGNTDRHSIKKNLIGALLFDSGETAEATRLKRTARRRYTRRKNRICYLQEIFSNEMAKVDDSFFHRLEESFLVEEDKKHERHPIFGNIVDEVAYHEKYPTIYHLRKKLVDSTDKADLRLIYLALAHMIKFRGHFLIEGDLNPDNSDVDKLFIQLVQTYNQLFEENPINASGVDAKAILSARLSKSRRLENLIAQLPGEKKNGLFGNLIALSLGLTPNFKSNFDLAEDAKLQLSKDTYDDDLDNLLAQIGDQYADLFLAAKNLSDAILLSDILRVNTEITKAPLSASMIKRYDEHHQDLTLLKALVRQQLPEKYKEIFFDQSKNGYAGYIDGGASQEEFYKFIKPILEKMDGTEELLVKLNREDLLRKQRTFDNGSIPHQIHLGELHAILRRQEDFYPFLKDNREKIEKILTFRIPYYVGPLARGNSRFAWMTRKSEETITPWNFEEVVDKGASAQSFIERMTNFDKNLPNEKVLPKHSLLYEYFTVYNELTKVKYVTEGMRKPAFLSGEQKKAIVDLLFKTNRKVTVKQLKEDYFKKIECFDSVEISGVEDRFNASLGTYHDLLKIIKDKDFLDNEENEDILEDIVLTLTLFEDREMIEERLKTYAHLFDDKVMKQLKRRRYTGWGRLSRKLINGIRDKQSGKTILDFLKSDGFANRNFMQLIHDDSLTFKEDIQKAQVSGQGDSLHEHIANLAGSPAIKKGILQTVKVVDELVKVMGRHKPENIVIEMARENQTTQKGQKNSRERMKRIEEGIKELGSQILKEHPVENTQLQNEKLYLYYLQNGRDMYVDQELDINRLSDYDVDHIVPQSFLKDDSIDNKVLTRSDKARGKSDNVPSEEVVKKMKNYWRQLLNAKLITQRKFDNLTKAERGGLSELDKAGFIKRQLVETRQITKHVAQILDSRMNTKYDENDKLIREVKVITLKSKLVSDFRKDFQFYKVREINNYHHAHDAYLNAVVGTALIKKYPKLESEFVYGDYKVYDVRKMIAKSEQEIGKATAKYFFYSNIMNFFKTEITLANGEIRKRPLIETNGETGEIVWDKGRDFATVRKVLSMPQVNIVKKTEVQTGGFSKESILPKRNSDKLIARKKDWDPKKYGGFDSPTVAYSVLVVAKVEKGKSKKLKSVKELLGITIMERSSFEKNPIDFLEAKGYKEVKKDLIIKLPKYSLFELENGRKRMLASAGELQKGNELALPSKYVNFLYLASHYEKLKGSPEDNEQKQLFVEQHKHYLDEIIEQISEFSKRVILADANLDKVLSAYNKHRDKPIREQAENIIHLFTLTNLGAPAAFKYFDTTIDRKRYTSTKEVLDATLIHQSITGLYETRIDLSQLGGDGGGSSPAPGGGGGTLNIEDEYRLHETSKGPDVPLGSTWLSDFPQAWAETGGMGLAFRQAPLIISLKATSTPVSIKQYPMSQEARLGIKPHIQRLLDQGILVPCQSPWNTPLLPVKKPGTNDYRPVQDLREVNKRVEDIHPTVPNPYNLLSGLPPSHQWYTVLDLKDAFFCLRLHPTSQSLFAFEWKDPEMGISGQLTWTRLPQGFKNSPTLFNEALHRDLADFRIQHPDLILLQYVDDLLLAATSELDCQQGTRALLQTLGDLGYRASAKKAQICQKQVKYLGYLLKEGQRWLTEARKETVMGQPTPKTPRQLREFLGTAGLCRLWIPGFAEMAAPLYPLTKPGTLFKWGPDQQKAYQEIKQALLTAPALGLPDLTKPFELFVDEKQGYAKGVLTQKLGPWRRPVAYLSKKLDPVAAGWPPCLRMVAAIAVLTKDVGKLTMGQPLVILAPHAVEALVKQPPDRWLSNARMTHYQALLLDTDRVQFGPIVALNPATLLPLPEEGLQHDCLDILAEAHGTRPDLTDQPLPDADHTWYTDGSSFLQEGQRRAGAAVTTETEVIWAKALPAGTSAQRAELIALTQALKMAAGKKLNVYTDSRYAFATAHIHGEIYRRRGWLTSEGKEIKNKDEILALLKALFLPKRLSIIHCPGHQKGNHAEARGNRMADQAAREVATRETPETSTLLAGKRTADGSEFEKRTADGSEFESPKKKAKVE

SEQ ID NO: 7410 - protein, 2094 aa, synthetic construct
MPAAKRVKLDGGDKKYSIGLDIGTNSVGWAVITDEYKVPSKKFKVLGNTDRHSIKKNLIGALLFDSGETAEATRLKRTARRRYTRRKNRICYLQEIFSNEMAKVDDSFFHRLEESFLVEEDKKHERHPIFGNIVDEVAYHEKYPTIYHLRKKLVDSTDKADLRLIYLALAHMIKFRGHFLIEGDLNPDNSDVDKLFIQLVQTYNQLFEENPINASGVDAKAILSARLSKSRRLENLIAQLPGEKKNGLFGNLIALSLGLTPNFKSNFDLAEDAKLQLSKDTYDDDLDNLLAQIGDQYADLFLAAKNLSDAILLSDILRVNTEITKAPLSASMIKRYDEHHQDLTLLKALVRQQLPEKYKEIFFDQSKNGYAGYIDGGASQEEFYKFIKPILEKMDGTEELLVKLNREDLLRKQRTFDNGSIPHQIHLGELHAILRRQEDFYPFLKDNREKIEKILTFRIPYYVGPLARGNSRFAWMTRKSEETITPWNFEEVVDKGASAQSFIERMTNFDKNLPNEKVLPKHSLLYEYFTVYNELTKVKYVTEGMRKPAFLSGEQKKAIVDLLFKTNRKVTVKQLKEDYFKKIECFDSVEISGVEDRFNASLGTYHDLLKIIKDKDFLDNEENEDILEDIVLTLTLFEDREMIEERLKTYAHLFDDKVMKQLKRRRYTGWGRLSRKLINGIRDKQSGKTILDFLKSDGFANRNFMQLIHDDSLTFKEDIQKAQVSGQGDSLHEHIANLAGSPAIKKGILQTVKVVDELVKVMGRHKPENIVIEMARENQTTQKGQKNSRERMKRIEEGIKELGSQILKEHPVENTQLQNEKLYLYYLQNGRDMYVDQELDINRLSDYDVDHIVPQSFLKDDSIDNKVLTRSDKARGKSDNVPSEEVVKKMKNYWRQLLNAKLITQRKFDNLTKAERGGLSELDKAGFIKRQLVETRQITKHVAQILDSRMNTKYDENDKLIREVKVITLKSKLVSDFRKDFQFYKVREINNYHHAHDAYLNAVVGTALIKKYPKLESEFVYGDYKVYDVRKMIAKSEQEIGKATAKYFFYSNIMNFFKTEITLANGEIRKRPLIETNGETGEIVWDKGRDFATVRKVLSMPQVNIVKKTEVQTGGFSKESILPKRNSDKLIARKKDWDPKKYGGFDSPTVAYSVLVVAKVEKGKSKKLKSVKELLGITIMERSSFEKNPIDFLEAKGYKEVKKDLIIKLPKYSLFELENGRKRMLASAGELQKGNELALPSKYVNFLYLASHYEKLKGSPEDNEQKQLFVEQHKHYLDEIIEQISEFSKRVILADANLDKVLSAYNKHRDKPIREQAENIIHLFTLTNLGAPAAFKYFDTTIDRKRYTSTKEVLDATLIHQSITGLYETRIDLSQLGGDGGGSSPAPGGGGGTLNIEDEYRLHETSKGPDVPLGSTWLSDFPQAWAETGGMGLAVRQAPLIIPLKATSTPVSIKQYPMSQEARLGIKPHIQRLLDQGILVPCQSPWNTPLLPVKKPGTNDYRPVQDLREVNKRVEDIHPTVPNPYNLLSGLPPSHQWYTVLDLKDAFFCLRLHPTSQSLFAFEWRDPEMGISGQLTWTRLPQGFKNSPTLFNEALHRDLADFRIQHPDLILLQYVDDLLLAATSELDCQQGTRALLQTLGDLGYRASAKKAQICQKQVKYLGYLLKEGQRWLTEARKETVMGQPTPKTPRQLREFLGTAGFCRLWIPGFAEMAAPLYPLTKPGTLFEWGPDQQKAYQEIKQALLTAPALGLPDLTKPFELFVDEKQGYAKGVLTQKLGPWRRPVAYLSKKLDPVAAGWPPCLRMVAAIAVLTKDAGKLTMGQPLVILAPHAVEALVKQPPDRWLSNARMTHYQALLLDTDRVQFGPIVALNPATLLPLPEEGLQHDCLDILAEAHGTRPDLTDQPLPDADHTWYTDGSSFLQEGQRKAGAAVTTETEVVWAKALPAGTSAQRAELIALTQALKMAEGKKLNVYTDSRYAFATAHIHGEIYRRRGWLTSEGKEIKNKDEILALLKALFLPKRLSIIHCPGHQKGNRAEARGNRMADQAAREVATRETPETSTLLAGKRTADGSEFEKRTADGSEFESPKKKAKVE

SEQ ID NO: 7411 - protein, 2094 aa, synthetic construct
MPAAKRVKLDGGDKKYSIGLDIGTNSVGWAVITDEYKVPSKKFKVLGNTDRHSIKKNLIGALLFDSGETAEATRLKRTARRRYTRRKNRICYLQEIFSNEMAKVDDSFFHRLEESFLVEEDKKHERHPIFGNIVDEVAYHEKYPTIYHLRKKLVDSTDKADLRLIYLALAHMIKFRGHFLIEGDLNPDNSDVDKLFIQLVQTYNQLFEENPINASGVDAKAILSARLSKSRRLENLIAQLPGEKKNGLFGNLIALSLGLTPNFKSNFDLAEDAKLQLSKDTYDDDLDNLLAQIGDQYADLFLAAKNLSDAILLSDILRVNTEITKAPLSASMIKRYDEHHQDLTLLKALVRQQLPEKYKEIFFDQSKNGYAGYIDGGASQEEFYKFIKPILEKMDGTEELLVKLNREDLLRKQRTFDNGSIPHQIHLGELHAILRRQEDFYPFLKDNREKIEKILTFRIPYYVGPLARGNSRFAWMTRKSEETITPWNFEEVVDKGASAQSFIERMTNFDKNLPNEKVLPKHSLLYEYFTVYNELTKVKYVTEGMRKPAFLSGEQKKAIVDLLFKTNRKVTVKQLKEDYFKKIECFDSVEISGVEDRFNASLGTYHDLLKIIKDKDFLDNEENEDILEDIVLTLTLFEDREMIEERLKTYAHLFDDKVMKQLKRRRYTGWGRLSRKLINGIRDKQSGKTILDFLKSDGFANRNFMQLIHDDSLTFKEDIQKAQVSGQGDSLHEHIANLAGSPAIKKGILQTVKVVDELVKVMGRHKPENIVIEMARENQTTQKGQKNSRERMKRIEEGIKELGSQILKEHPVENTQLQNEKLYLYYLQNGRDMYVDQELDINRLSDYDVDHIVPQSFLKDDSIDNKVLTRSDKARGKSDNVPSEEVVKKMKNYWRQLLNAKLITQRKFDNLTKAERGGLSELDKAGFIKRQLVETRQITKHVAQILDSRMNTKYDENDKLIREVKVITLKSKLVSDFRKDFQFYKVREINNYHHAHDAYLNAVVGTALIKKYPKLESEFVYGDYKVYDVRKMIAKSEQEIGKATAKYFFYSNIMNFFKTEITLANGEIRKRPLIETNGETGEIVWDKGRDFATVRKVLSMPQVNIVKKTEVQTGGFSKESILPKRNSDKLIARKKDWDPKKYGGFDSPTVAYSVLVVAKVEKGKSKKLKSVKELLGITIMERSSFEKNPIDFLEAKGYKEVKKDLIIKLPKYSLFELENGRKRMLASAGELQKGNELALPSKYVNFLYLASHYEKLKGSPEDNEQKQLFVEQHKHYLDEIIEQISEFSKRVILADANLDKVLSAYNKHRDKPIREQAENIIHLFTLTNLGAPAAFKYFDTTIDRKRYTSTKEVLDATLIHQSITGLYETRIDLSQLGGDGGGSSPAPGGGGGTLNIEDEHRLHETSKEPDVSLGSTWLSDFPQAWAETGGMGLAVRQAPLIIPLKATSTPVSIKQYPMSQEARLGIKPHIQRLLDQGILVPCQSPWNTPLLPVKKPGTNDYRPVQDLREVNKRVEDIHPTVPNPYNLLSGLPPSHQWYTVLDLKDAFFCLRLHPTSQPLFAFEWRDPEMGISGQLTWTRLPQGFKNSPTLFDEALHRDLADFRIQHPDLILLQYVDDLLLAATSELDCQQGTRALLQTLGNLGYRASAKKAQICQKQVKYLGYLLKEGQRWLTEARKETVMGQPTPKTPRQLREFLGTAGFCRLWIPGFAEMAAPLYPLTKTGTLFNWGPDQQKAYQEIKQALLTAPALGLPDLTKPFELFVDEKQGYAKGVLTQKLGPWRRPVAYLSKKLDPVAAGWPPCLRMVAAIAVLTKDAGKLTMGQPLVILAPHAVEALVKQPPDRWLSNARMTHYQALLLDTDRVQFGPVVALNPATLLPLPEEGLQHNCLDILAEAHGTRPDLTDQPLPDADHTWYTDGSSLLQEGQRKAGAAVTTETEVIWAKALPAGTSAQRAELIALTQALKMAEGKKLNVYTDSRYAFATAHIHGEIYRRRGLLTSEGKEIKNKDEILALLKALFLPKRLSIIHCPGHQKGHSAEARGNRMADQAARKAAITETPDTSTLLAGKRTADGSEFEKRTADGSEFESPKKKAKVE

SEQ ID NO: 7412 - protein, 2100 aa, synthetic construct
MPAAKRVKLDGGDKKYSIGLDIGTNSVGWAVITDEYKVPSKKFKVLGNTDRHSIKKNLIGALLFDSGETAEATRLKRTARRRYTRRKNRICYLQEIFSNEMAKVDDSFFHRLEESFLVEEDKKHERHPIFGNIVDEVAYHEKYPTIYHLRKKLVDSTDKADLRLIYLALAHMIKFRGHFLIEGDLNPDNSDVDKLFIQLVQTYNQLFEENPINASGVDAKAILSARLSKSRRLENLIAQLPGEKKNGLFGNLIALSLGLTPNFKSNFDLAEDAKLQLSKDTYDDDLDNLLAQIGDQYADLFLAAKNLSDAILLSDILRVNTEITKAPLSASMIKRYDEHHQDLTLLKALVRQQLPEKYKEIFFDQSKNGYAGYIDGGASQEEFYKFIKPILEKMDGTEELLVKLNREDLLRKQRTFDNGSIPHQIHLGELHAILRRQEDFYPFLKDNREKIEKILTFRIPYYVGPLARGNSRFAWMTRKSEETITPWNFEEVVDKGASAQSFIERMTNFDKNLPNEKVLPKHSLLYEYFTVYNELTKVKYVTEGMRKPAFLSGEQKKAIVDLLFKTNRKVTVKQLKEDYFKKIECFDSVEISGVEDRFNASLGTYHDLLKIIKDKDFLDNEENEDILEDIVLTLTLFEDREMIEERLKTYAHLFDDKVMKQLKRRRYTGWGRLSRKLINGIRDKQSGKTILDFLKSDGFANRNFMQLIHDDSLTFKEDIQKAQVSGQGDSLHEHIANLAGSPAIKKGILQTVKVVDELVKVMGRHKPENIVIEMARENQTTQKGQKNSRERMKRIEEGIKELGSQILKEHPVENTQLQNEKLYLYYLQNGRDMYVDQELDINRLSDYDVDHIVPQSFLKDDSIDNKVLTRSDKARGKSDNVPSEEVVKKMKNYWRQLLNAKLITQRKFDNLTKAERGGLSELDKAGFIKRQLVETRQITKHVAQILDSRMNTKYDENDKLIREVKVITLKSKLVSDFRKDFQFYKVREINNYHHAHDAYLNAVVGTALIKKYPKLESEFVYGDYKVYDVRKMIAKSEQEIGKATAKYFFYSNIMNFFKTEITLANGEIRKRPLIETNGETGEIVWDKGRDFATVRKVLSMPQVNIVKKTEVQTGGFSKESILPKRNSDKLIARKKDWDPKKYGGFDSPTVAYSVLVVAKVEKGKSKKLKSVKELLGITIMERSSFEKNPIDFLEAKGYKEVKKDLIIKLPKYSLFELENGRKRMLASAGELQKGNELALPSKYVNFLYLASHYEKLKGSPEDNEQKQLFVEQHKHYLDEIIEQISEFSKRVILADANLDKVLSAYNKHRDKPIREQAENIIHLFTLTNLGAPAAFKYFDTTIDRKRYTSTKEVLDATLIHQSITGLYETRIDLSQLGGDGGPAPGGGGSSGGTVSLQDEHRLFDIPVTTSLPDVWLQDFPQAWAETGGLGRAKCQAPIIIDLKPTAVPVSIKQYPMSLEAHMGIRQHIIKFLELGVLRPCRSPWNTPLLPVKKPGTQDYRPVQDLREINKRTVDIHPTVPNPYNLLSTLKPDYSWYTVLDLKDAFFCLPLAPQSQELFAFEWKDPERGISGQLTWTRLPQGFKNSPTLFNEALHRDLTDFRTQHPEVTLLQYVDDLLLAAPTKKACTQGTRHLLQELGEKGYRASAKKAQICQTKVTYLGYILSEGKRWLTPGRIETVARIPPPRNPREVREFLGTAGFCRLWIPGFAELAAPLYALTKPSTPFTWQTEHQLAFEALKKALLSAPALGLPDTSKPFTLFLDERQGIAKGVLTQKLGPWKRPVAYLSKKLDPVAAGWPPCLRIMAATAMLVKDSAKLTLGQPLTVITPHTLEAIVRQPPDRWITNARLTHYQALLLDTDRVQFGPPVTLNPATLLPVPENQPSPHDCRQVLAETHGTREDLKDQELPDADHTWYTDGSSYLDSGTRRAGAAVVDGHNTIWAQSLPPGTSAQKAELIALTKALELSKGKKANIYTDSRYAFATAHTHGSIYERRGWLTSEGKEIKNKAEIIALLKALFLPQEVAIIHCPGHQKGQDPVAVGNRQADRVARQAAMAEVLTLATEPDNTSHITAGKRTADGSEFEKRTADGSEFESPKKKAKVE

SEQ ID NO: 7413 - protein, 1999 aa, synthetic construct
MPAAKRVKLDGGDKKYSIGLDIGTNSVGWAVITDEYKVPSKKFKVLGNTDRHSIKKNLIGALLFDSGETAEATRLKRTARRRYTRRKNRICYLQEIFSNEMAKVDDSFFHRLEESFLVEEDKKHERHPIFGNIVDEVAYHEKYPTIYHLRKKLVDSTDKADLRLIYLALAHMIKFRGHFLIEGDLNPDNSDVDKLFIQLVQTYNQLFEENPINASGVDAKAILSARLSKSRRLENLIAQLPGEKKNGLFGNLIALSLGLTPNFKSNFDLAEDAKLQLSKDTYDDDLDNLLAQIGDQYADLFLAAKNLSDAILLSDILRVNTEITKAPLSASMIKRYDEHHQDLTLLKALVRQQLPEKYKEIFFDQSKNGYAGYIDGGASQEEFYKFIKPILEKMDGTEELLVKLNREDLLRKQRTFDNGSIPHQIHLGELHAILRRQEDFYPFLKDNREKIEKILTFRIPYYVGPLARGNSRFAWMTRKSEETITPWNFEEVVDKGASAQSFIERMTNFDKNLPNEKVLPKHSLLYEYFTVYNELTKVKYVTEGMRKPAFLSGEQKKAIVDLLFKTNRKVTVKQLKEDYFKKIECFDSVEISGVEDRFNASLGTYHDLLKIIKDKDFLDNEENEDILEDIVLTLTLFEDREMIEERLKTYAHLFDDKVMKQLKRRRYTGWGRLSRKLINGIRDKQSGKTILDFLKSDGFANRNFMQLIHDDSLTFKEDIQKAQVSGQGDSLHEHIANLAGSPAIKKGILQTVKVVDELVKVMGRHKPENIVIEMARENQTTQKGQKNSRERMKRIEEGIKELGSQILKEHPVENTQLQNEKLYLYYLQNGRDMYVDQELDINRLSDYDVDHIVPQSFLKDDSIDNKVLTRSDKARGKSDNVPSEEVVKKMKNYWRQLLNAKLITQRKFDNLTKAERGGLSELDKAGFIKRQLVETRQITKHVAQILDSRMNTKYDENDKLIREVKVITLKSKLVSDFRKDFQFYKVREINNYHHAHDAYLNAVVGTALIKKYPKLESEFVYGDYKVYDVRKMIAKSEQEIGKATAKYFFYSNIMNFFKTEITLANGEIRKRPLIETNGETGEIVWDKGRDFATVRKVLSMPQVNIVKKTEVQTGGFSKESILPKRNSDKLIARKKDWDPKKYGGFDSPTVAYSVLVVAKVEKGKSKKLKSVKELLGITIMERSSFEKNPIDFLEAKGYKEVKKDLIIKLPKYSLFELENGRKRMLASAGELQKGNELALPSKYVNFLYLASHYEKLKGSPEDNEQKQLFVEQHKHYLDEIIEQISEFSKRVILADANLDKVLSAYNKHRDKPIREQAENIIHLFTLTNLGAPAAFKYFDTTIDRKRYTSTKEVLDATLIHQSITGLYETRIDLSQLGGDGGPAPGGGGSSGGGVLDTPPSHIGLEHLPPPPEVPQFPLNLERLQALQDLVHRSLEAGYISPWDGPGNNPVFPVRKPNGAWRFVHDLRATNALTKPIPALSPGPPDLTAPPTHPPHIICLDLKDAFFQIPVEDRFRFYLSFTLPSPGGLQPHRRFAWRVLPQGFINSPALFQRALQEPLRQVSAAFSQSLLVSYMDDILYASPTEEQRSQCYQALAARLRDLGFQVASEKTSQTPSPVPFLGQMVHEQIVTYQSLPTLQISSPISLHQLQAVLGDLQWVSRGTPTTRRPLQLLYSSLKRHHDPRAIIQLSPEQLQGIAELRQALSHNARSRYNEQEPLLAYVHLTRAGSTLVLFQKGAQFPLAYFQTPLTDNQASPWGLLLLLGCQYLQTQALSSYAKPILKYYHNLPKTSLDNWIQSSEDPRVQELLQLWPQISSQGIQPPGPWKTLITRAEVFLTPQFSPDPIPAALCLFSDGATGRGAYCLWKDHLLDFQAVPAPESAQKGELAGLLAGLAAAPPEPVNIWVDSKYLYSLLRTWVLGAWLQPDPVPSYALLYKSLLRHPAIVVGHVRSHSSASHPIASLNNYVDQLAGKRTADGSEFEKRTADGSEFESPKKKAKVE

SEQ ID NO: 7414 - protein, 2171 aa, synthetic construct
MPAAKRVKLDGGDKKYSIGLDIGTNSVGWAVITDEYKVPSKKFKVLGNTDRHSIKKNLIGALLFDSGETAEATRLKRTARRRYTRRKNRICYLQEIFSNEMAKVDDSFFHRLEESFLVEEDKKHERHPIFGNIVDEVAYHEKYPTIYHLRKKLVDSTDKADLRLIYLALAHMIKFRGHFLIEGDLNPDNSDVDKLFIQLVQTYNQLFEENPINASGVDAKAILSARLSKSRRLENLIAQLPGEKKNGLFGNLIALSLGLTPNFKSNFDLAEDAKLQLSKDTYDDDLDNLLAQIGDQYADLFLAAKNLSDAILLSDILRVNTEITKAPLSASMIKRYDEHHQDLTLLKALVRQQLPEKYKEIFFDQSKNGYAGYIDGGASQEEFYKFIKPILEKMDGTEELLVKLNREDLLRKQRTFDNGSIPHQIHLGELHAILRRQEDFYPFLKDNREKIEKILTFRIPYYVGPLARGNSRFAWMTRKSEETITPWNFEEVVDKGASAQSFIERMTNFDKNLPNEKVLPKHSLLYEYFTVYNELTKVKYVTEGMRKPAFLSGEQKKAIVDLLFKTNRKVTVKQLKEDYFKKIECFDSVEISGVEDRFNASLGTYHDLLKIIKDKDFLDNEENEDILEDIVLTLTLFEDREMIEERLKTYAHLFDDKVMKQLKRRRYTGWGRLSRKLINGIRDKQSGKTILDFLKSDGFANRNFMQLIHDDSLTFKEDIQKAQVSGQGDSLHEHIANLAGSPAIKKGILQTVKVVDELVKVMGRHKPENIVIEMARENQTTQKGQKNSRERMKRIEEGIKELGSQILKEHPVENTQLQNEKLYLYYLQNGRDMYVDQELDINRLSDYDVDHIVPQSFLKDDSIDNKVLTRSDKARGKSDNVPSEEVVKKMKNYWRQLLNAKLITQRKFDNLTKAERGGLSELDKAGFIKRQLVETRQITKHVAQILDSRMNTKYDENDKLIREVKVITLKSKLVSDFRKDFQFYKVREINNYHHAHDAYLNAVVGTALIKKYPKLESEFVYGDYKVYDVRKMIAKSEQEIGKATAKYFFYSNIMNFFKTEITLANGEIRKRPLIETNGETGEIVWDKGRDFATVRKVLSMPQVNIVKKTEVQTGGFSKESILPKRNSDKLIARKKDWDPKKYGGFDSPTVAYSVLVVAKVEKGKSKKLKSVKELLGITIMERSSFEKNPIDFLEAKGYKEVKKDLIIKLPKYSLFELENGRKRMLASAGELQKGNELALPSKYVNFLYLASHYEKLKGSPEDNEQKQLFVEQHKHYLDEIIEQISEFSKRVILADANLDKVLSAYNKHRDKPIREQAENIIHLFTLTNLGAPAAFKYFDTTIDRKRYTSTKEVLDATLIHQSITGLYETRIDLSQLGGDGGPAPGGGGSSGGMDLLKPLTVERKGVKIKGYWNSQADITCVPKDLLQGEEPVRQQNVTTIHGTQEGDVYYVNLKIDGRRINTEVIGTTLDYAIITPGDVPWILKKPLELTIKLDLEEQQGTLLNNSILSKKGKEELKQLFEKYSALWQSWENQVGHRRIRPHKIATGTVKPTPQKQYHINPKAKPDIQIVINDLLKQGVLIQKESTMNTPVYPVPKPNGRWRMVLDYRAVNKVTPLIAVQNQHSYGILGSLFKGRYKTTIDLSNGFWAHPIVPEDYWITAFTWQGKQYCWTVLPQGFLNSPGLFTGDVVDLLQGIPNVEVYVDDVYISHDSEKEHLEYLDILFNRLKEAGYIISLKKSNIANSIVDFLGFQITNEGRGLTDTFKEKLENITAPTTLKQLQSILGLLNFARNFIPDFTELIAPLYALIPKSTKNYVPWQIEHSTTLETLITKLNGAEYLQGRKGDKTLIMKVNASYTTGYIRYYNEGEKKPISYVSIVFSKTELKFTELEKLLTTVHKGLLKALDLSMGQNIHVYSPIVSMQNIQKTPQTAKKALASRWLSWLSYLEDPRIRFFYDPQMPALKDLPAVDTGKDNKKHPSNFQHIFYTDGSAITSPTKEGHLNAGMGIVYFINKDGNLQKQQEWSISLGNHTAQFAEIAAFEFALKKCLPLGGNILVVTDSNYVAKAYNEELDVWASNGFVNNRKKPLKHISKWKSVADLKRLRPDVVVTHEPGHQKLDSSPHAYGNNLADQLATQASFKVHAGKRTADGSEFEKRTADGSEFESPKKKAKVE

SEQ ID NO: 7415 - protein, 2093 aa, synthetic construct
MPAAKRVKLDGGDKKYSIGLDIGTNSVGWAVITDEYKVPSKKFKVLGNTDRHSIKKNLIGALLFDSGETAEATRLKRTARRRYTRRKNRICYLQEIFSNEMAKVDDSFFHRLEESFLVEEDKKHERHPIFGNIVDEVAYHEKYPTIYHLRKKLVDSTDKADLRLIYLALAHMIKFRGHFLIEGDLNPDNSDVDKLFIQLVQTYNQLFEENPINASGVDAKAILSARLSKSRRLENLIAQLPGEKKNGLFGNLIALSLGLTPNFKSNFDLAEDAKLQLSKDTYDDDLDNLLAQIGDQYADLFLAAKNLSDAILLSDILRVNTEITKAPLSASMIKRYDEHHQDLTLLKALVRQQLPEKYKEIFFDQSKNGYAGYIDGGASQEEFYKFIKPILEKMDGTEELLVKLNREDLLRKQRTFDNGSIPHQIHLGELHAILRRQEDFYPFLKDNREKIEKILTFRIPYYVGPLARGNSRFAWMTRKSEETITPWNFEEVVDKGASAQSFIERMTNFDKNLPNEKVLPKHSLLYEYFTVYNELTKVKYVTEGMRKPAFLSGEQKKAIVDLLFKTNRKVTVKQLKEDYFKKIECFDSVEISGVEDRFNASLGTYHDLLKIIKDKDFLDNEENEDILEDIVLTLTLFEDREMIEERLKTYAHLFDDKVMKQLKRRRYTGWGRLSRKLINGIRDKQSGKTILDFLKSDGFANRNFMQLIHDDSLTFKEDIQKAQVSGQGDSLHEHIANLAGSPAIKKGILQTVKVVDELVKVMGRHKPENIVIEMARENQTTQKGQKNSRERMKRIEEGIKELGSQILKEHPVENTQLQNEKLYLYYLQNGRDMYVDQELDINRLSDYDVDHIVPQSFLKDDSIDNKVLTRSDKARGKSDNVPSEEVVKKMKNYWRQLLNAKLITQRKFDNLTKAERGGLSELDKAGFIKRQLVETRQITKHVAQILDSRMNTKYDENDKLIREVKVITLKSKLVSDFRKDFQFYKVREINNYHHAHDAYLNAVVGTALIKKYPKLESEFVYGDYKVYDVRKMIAKSEQEIGKATAKYFFYSNIMNFFKTEITLANGEIRKRPLIETNGETGEIVWDKGRDFATVRKVLSMPQVNIVKKTEVQTGGFSKESILPKRNSDKLIARKKDWDPKKYGGFDSPTVAYSVLVVAKVEKGKSKKLKSVKELLGITIMERSSFEKNPIDFLEAKGYKEVKKDLIIKLPKYSLFELENGRKRMLASAGELQKGNELALPSKYVNFLYLASHYEKLKGSPEDNEQKQLFVEQHKHYLDEIIEQISEFSKRVILADANLDKVLSAYNKHRDKPIREQAENIIHLFTLTNLGAPAAFKYFDTTIDRKRYTSTKEVLDATLIHQSITGLYETRIDLSQLGGDGGPAPGGGGSSGGTLQLEEEYRLFEPESTQKQEMDIWLKNFPQAWAETGGMGTAHCQAPVLIQLKATATPISIRQYPMPHEAYQGIKPHIRRMLDQGILKPCQSPWNTPLLPVKKPGTEDYRPVQDLREVNKRVEDIHPTVPNPYNLLSTLPPSHPWYTVLDLKDAFFCLRLHSESQLLFAFEWRDPEIGLSGQLTWTRLPQGFKNSPTLFNEALHSDLADFRVRYPALVLLQYVDDLLLAAATRTECLEGTKALLETLGNKGYRASAKKAQICLQEVTYLGYSLKDGQRWLTKARKEAILSIPVPKNSRQVREFLGTAGYCRLWIPGFAELAAPLYPLTRPGTLFQWGTEQQLAFEDIKKALLSSPALGLPDITKPFELFIDENSGFAKGVLVQKLGPWKRPVAYLSKKLDTVASGWPPCLRMVAAIAILVKDAGKLTLGQPLTILTSHPVEALVRQPPNKWLSNARMTHYQAMLLDAERVHFGPTVSLNPATLLPLPSGGNHHDCLQILAETHGTRPDLTDQPLPDADLTWYTDGSSFIRNGEREAGAAVTTESEVIWAAPLPPGTSAQRAELIALTQALKMAEGKKLTVYTDSRYAFATTHVHGEIYRRRGWLTSEGKEIKNKNEILALLEALFLPKRLSIIHCPGHQKGDSPQAKGNRLADDTAKKAATETHSSLTVLPAGKRTADGSEFEKRTADGSEFESPKKKAKVE

SEQ ID NO: 7416 - protein, 2216 aa, synthetic construct
MPAAKRVKLDGGDKKYSIGLDIGTNSVGWAVITDEYKVPSKKFKVLGNTDRHSIKKNLIGALLFDSGETAEATRLKRTARRRYTRRKNRICYLQEIFSNEMAKVDDSFFHRLEESFLVEEDKKHERHPIFGNIVDEVAYHEKYPTIYHLRKKLVDSTDKADLRLIYLALAHMIKFRGHFLIEGDLNPDNSDVDKLFIQLVQTYNQLFEENPINASGVDAKAILSARLSKSRRLENLIAQLPGEKKNGLFGNLIALSLGLTPNFKSNFDLAEDAKLQLSKDTYDDDLDNLLAQIGDQYADLFLAAKNLSDAILLSDILRVNTEITKAPLSASMIKRYDEHHQDLTLLKALVRQQLPEKYKEIFFDQSKNGYAGYIDGGASQEEFYKFIKPILEKMDGTEELLVKLNREDLLRKQRTFDNGSIPHQIHLGELHAILRRQEDFYPFLKDNREKIEKILTFRIPYYVGPLARGNSRFAWMTRKSEETITPWNFEEVVDKGASAQSFIERMTNFDKNLPNEKVLPKHSLLYEYFTVYNELTKVKYVTEGMRKPAFLSGEQKKAIVDLLFKTNRKVTVKQLKEDYFKKIECFDSVEISGVEDRFNASLGTYHDLLKIIKDKDFLDNEENEDILEDIVLTLTLFEDREMIEERLKTYAHLFDDKVMKQLKRRRYTGWGRLSRKLINGIRDKQSGKTILDFLKSDGFANRNFMQLIHDDSLTFKEDIQKAQVSGQGDSLHEHIANLAGSPAIKKGILQTVKVVDELVKVMGRHKPENIVIEMARENQTTQKGQKNSRERMKRIEEGIKELGSQILKEHPVENTQLQNEKLYLYYLQNGRDMYVDQELDINRLSDYDVDHIVPQSFLKDDSIDNKVLTRSDKARGKSDNVPSEEVVKKMKNYWRQLLNAKLITQRKFDNLTKAERGGLSELDKAGFIKRQLVETRQITKHVAQILDSRMNTKYDENDKLIREVKVITLKSKLVSDFRKDFQFYKVREINNYHHAHDAYLNAVVGTALIKKYPKLESEFVYGDYKVYDVRKMIAKSEQEIGKATAKYFFYSNIMNFFKTEITLANGEIRKRPLIETNGETGEIVWDKGRDFATVRKVLSMPQVNIVKKTEVQTGGFSKESILPKRNSDKLIARKKDWDPKKYGGFDSPTVAYSVLVVAKVEKGKSKKLKSVKELLGITIMERSSFEKNPIDFLEAKGYKEVKKDLIIKLPKYSLFELENGRKRMLASAGELQKGNELALPSKYVNFLYLASHYEKLKGSPEDNEQKQLFVEQHKHYLDEIIEQISEFSKRVILADANLDKVLSAYNKHRDKPIREQAENIIHLFTLTNLGAPAAFKYFDTTIDRKRYTSTKEVLDATLIHQSITGLYETRIDLSQLGGDGGPAPGGGGSSGGTLGDQGSRGSDPLPEPRVTLTVEGIPTEFLVNTGAEHSVLTKPMGKMGSKRTVVAGATGSKVYPWTTKRLLKIGQKQVTHSFLVIPECPAPLLGRDLLTKLKAQIQFSTEGPQVTWEDRPAMCLVLNLEEEYRLHEKPVPPSIDPSWLQLFPMVWAEKAGMGLANQVPPVVVELKSDASPVAVRQYPMSKEAREGIRPHIQRFLDLGILVPCQSPWNTPLLPVKKPGTNDYRPVQDLREVNKRVQDIHPTVPNPYNLLSSLPPSHTWYSVLDLKDAFFCLKLHPNSQPLFAFEWRDPEKGNTGQLTWTRLPQGFKNSPTLFDEALHRDLASFRALNPQVVMLQYVDDLLVAAPTYRDCKEGTRRLLQELSKLGYRVSAKKAQLCREEVTYLGYLLKGGKRWLTPARKATVMKIPTPTTPRQVREFLGTAGFCRLWIPGFASLAAPLYPLTREKVPFTWTEAHQEAFGRIKEALLSAPALALPDLTKPFALYVDEKEGVARGVLTQTLGPWRRPVAYLSKKLDPVASGWPTCLKAIAAVALLLKDADKLTLGQNVLVIAPHNLESIVRQPPDRWMTNARMTHYQSLLLNERVSFAPPAILNPATLLPVESDDTPIHICSEILAEETGTRPDLRDQPLPGVPAWYTDGSSFIMDGRRQAGAAIVDNKRTVWASNLPEGTSAQKAELIALTQALRLAEGKSINIYTDSRYAFATAHVHGAIYKQRGLLTSAGKDIKNKEEILALLEAIHLPKRVAIIHCPGHQRGTDPVATGNRKADEAAKQAAQSTRILTETTKNAGKRTADGSEFEKRTADGSEFESPKKKAKVE

SEQ ID NO: 7417 - protein, 2125 aa, synthetic construct
MPAAKRVKLDGGDKKYSIGLDIGTNSVGWAVITDEYKVPSKKFKVLGNTDRHSIKKNLIGALLFDSGETAEATRLKRTARRRYTRRKNRICYLQEIFSNEMAKVDDSFFHRLEESFLVEEDKKHERHPIFGNIVDEVAYHEKYPTIYHLRKKLVDSTDKADLRLIYLALAHMIKFRGHFLIEGDLNPDNSDVDKLFIQLVQTYNQLFEENPINASGVDAKAILSARLSKSRRLENLIAQLPGEKKNGLFGNLIALSLGLTPNFKSNFDLAEDAKLQLSKDTYDDDLDNLLAQIGDQYADLFLAAKNLSDAILLSDILRVNTEITKAPLSASMIKRYDEHHQDLTLLKALVRQQLPEKYKEIFFDQSKNGYAGYIDGGASQEEFYKFIKPILEKMDGTEELLVKLNREDLLRKQRTFDNGSIPHQIHLGELHAILRRQEDFYPFLKDNREKIEKILTFRIPYYVGPLARGNSRFAWMTRKSEETITPWNFEEVVDKGASAQSFIERMTNFDKNLPNEKVLPKHSLLYEYFTVYNELTKVKYVTEGMRKPAFLSGEQKKAIVDLLFKTNRKVTVKQLKEDYFKKIECFDSVEISGVEDRFNASLGTYHDLLKIIKDKDFLDNEENEDILEDIVLTLTLFEDREMIEERLKTYAHLFDDKVMKQLKRRRYTGWGRLSRKLINGIRDKQSGKTILDFLKSDGFANRNFMQLIHDDSLTFKEDIQKAQVSGQGDSLHEHIANLAGSPAIKKGILQTVKVVDELVKVMGRHKPENIVIEMARENQTTQKGQKNSRERMKRIEEGIKELGSQILKEHPVENTQLQNEKLYLYYLQNGRDMYVDQELDINRLSDYDVDHIVPQSFLKDDSIDNKVLTRSDKARGKSDNVPSEEVVKKMKNYWRQLLNAKLITQRKFDNLTKAERGGLSELDKAGFIKRQLVETRQITKHVAQILDSRMNTKYDENDKLIREVKVITLKSKLVSDFRKDFQFYKVREINNYHHAHDAYLNAVVGTALIKKYPKLESEFVYGDYKVYDVRKMIAKSEQEIGKATAKYFFYSNIMNFFKTEITLANGEIRKRPLIETNGETGEIVWDKGRDFATVRKVLSMPQVNIVKKTEVQTGGFSKESILPKRNSDKLIARKKDWDPKKYGGFDSPTVAYSVLVVAKVEKGKSKKLKSVKELLGITIMERSSFEKNPIDFLEAKGYKEVKKDLIIKLPKYSLFELENGRKRMLASAGELQKGNELALPSKYVNFLYLASHYEKLKGSPEDNEQKQLFVEQHKHYLDEIIEQISEFSKRVILADANLDKVLSAYNKHRDKPIREQAENIIHLFTLTNLGAPAAFKYFDTTIDRKRYTSTKEVLDATLIHQSITGLYETRIDLSQLGGDGGPAPGGGGSSGGLLGRDLLTKLKAQIQFSTEGPQVTWEDRPAMCLVLNLEEEYRLHEKPVPPSIDPSWLQLFPMVWAEKAGMGLANQVPPVVVELKSDASPVAVRQYPMSKEAREGIRPHIQRFLDLGILVPCQSPWNTPLLPVKKPGTNDYRPVQDLREVNKRVQDIHPTVPNPYNLLSSLPPSHTWYSVLDLKDAFFCLKLHPNSQPLFAFEWRDPEKGNTGQLTWTRLPQGFKNSPTLFNEALHRDLASFRALNPQVVMLQYVDDLLVAAPTYRDCKEGTRRLLQELSKLGYRVSAKKAQLCREEVTYLGYLLKGGKRWLTPARKATVMKIPTPTTPRQVREFLGTAGFCRLWIPGFASLAAPLYPLTRPKVPFTWTEAHQEAFGRIKEALLSAPALALPDLTKPFALYVDEKEGVARGVLTQTLGPWRRPVAYLSKKLDPVASGWPTCLKAIAAVALLLKDADKLTLGQNVLVIAPHNLESIVRQPPDRWMTNARMTHYQSLLLNERVSFAPPAILNPATLLPVESDDTPIHICSEILAEETGTRPDLRDQPLPGVPAWYTDGSSFIMDGRRQAGAAIVDNKRTVWASNLPEGTSAQKAELIALTQALRLAEGKSINIYTDSRYAFATAHVHGAIYKQRGWLTSAGKDIKNKEEILALLEAIHLPKRVAIIHCPGHQRGTDPVATGNRKADEAAKQAAQSTRILTETTKNAGKRTADGSEFEKRTADGSEFESPKKKAKVE

SEQ ID NO: 7418 - protein, 2216 aa, synthetic construct
MPAAKRVKLDGGDKKYSIGLDIGTNSVGWAVITDEYKVPSKKFKVLGNTDRHSIKKNLIGALLFDSGETAEATRLKRTARRRYTRRKNRICYLQEIFSNEMAKVDDSFFHRLEESFLVEEDKKHERHPIFGNIVDEVAYHEKYPTIYHLRKKLVDSTDKADLRLIYLALAHMIKFRGHFLIEGDLNPDNSDVDKLFIQLVQTYNQLFEENPINASGVDAKAILSARLSKSRRLENLIAQLPGEKKNGLFGNLIALSLGLTPNFKSNFDLAEDAKLQLSKDTYDDDLDNLLAQIGDQYADLFLAAKNLSDAILLSDILRVNTEITKAPLSASMIKRYDEHHQDLTLLKALVRQQLPEKYKEIFFDQSKNGYAGYIDGGASQEEFYKFIKPILEKMDGTEELLVKLNREDLLRKQRTFDNGSIPHQIHLGELHAILRRQEDFYPFLKDNREKIEKILTFRIPYYVGPLARGNSRFAWMTRKSEETITPWNFEEVVDKGASAQSFIERMTNFDKNLPNEKVLPKHSLLYEYFTVYNELTKVKYVTEGMRKPAFLSGEQKKAIVDLLFKTNRKVTVKQLKEDYFKKIECFDSVEISGVEDRFNASLGTYHDLLKIIKDKDFLDNEENEDILEDIVLTLTLFEDREMIEERLKTYAHLFDDKVMKQLKRRRYTGWGRLSRKLINGIRDKQSGKTILDFLKSDGFANRNFMQLIHDDSLTFKEDIQKAQVSGQGDSLHEHIANLAGSPAIKKGILQTVKVVDELVKVMGRHKPENIVIEMARENQTTQKGQKNSRERMKRIEEGIKELGSQILKEHPVENTQLQNEKLYLYYLQNGRDMYVDQELDINRLSDYDVDHIVPQSFLKDDSIDNKVLTRSDKARGKSDNVPSEEVVKKMKNYWRQLLNAKLITQRKFDNLTKAERGGLSELDKAGFIKRQLVETRQITKHVAQILDSRMNTKYDENDKLIREVKVITLKSKLVSDFRKDFQFYKVREINNYHHAHDAYLNAVVGTALIKKYPKLESEFVYGDYKVYDVRKMIAKSEQEIGKATAKYFFYSNIMNFFKTEITLANGEIRKRPLIETNGETGEIVWDKGRDFATVRKVLSMPQVNIVKKTEVQTGGFSKESILPKRNSDKLIARKKDWDPKKYGGFDSPTVAYSVLVVAKVEKGKSKKLKSVKELLGITIMERSSFEKNPIDFLEAKGYKEVKKDLIIKLPKYSLFELENGRKRMLASAGELQKGNELALPSKYVNFLYLASHYEKLKGSPEDNEQKQLFVEQHKHYLDEIIEQISEFSKRVILADANLDKVLSAYNKHRDKPIREQAENIIHLFTLTNLGAPAAFKYFDTTIDRKRYTSTKEVLDATLIHQSITGLYETRIDLSQLGGDGGPAPGGGGSSGGTLGDQGSRGSDPLPEPRVTLTVEGIPTEFLVNTGAEHSVLTKPMGKMGSKRTVVAGATGSKVYPWTTKRLLKIGQKQVTHSFLVIPECPAPLLGRDLLTKLKAQIQFSTEGPQVTWEDRPAMCLVLNLEEEYRLHEKPVPPSIDPSWLQLFPMVWAEKAGMGLANQVPPVVVELKSDASPVAVRQYPMSKEAREGIRPHIQRFLDLGILVPCQSPWNTPLLPVKKPGTNDYRPVQDLREVNKRVQDIHPTVPNPYNLLSSLPPSHTWYSVLDLKDAFFCLKLHPNSQPLFAFEWRDPEKGNTGQLTWTRLPQGFKNSPTLFNEALHRDLASFRALNPQVVMLQYVDDLLVAAPTYRDCKEGTRRLLQELSKLGYRVSAKKAQLCREEVTYLGYLLKGGKRWLTPARKATVMKIPTPTTPRQVREFLGTAGFCRLWIPGFASLAAPLYPLTRPKVPFTWTEAHQEAFGRIKEALLSAPALALPDLTKPFALYVDEKEGVARGVLTQTLGPWRRPVAYLSKKLDPVASGWPTCLKAIAAVALLLKDADKLTLGQNVLVIAPHNLESIVRQPPDRWMTNARMTHYQSLLLNERVSFAPPAILNPATLLPVESDDTPIHICSEILAEETGTRPDLRDQPLPGVPAWYTDGSSFIMDGRRQAGAAIVDNKRTVWASNLPEGTSAQKAELIALTQALRLAEGKSINIYTDSRYAFATAHVHGAIYKQRGWLTSAGKDIKNKEEILALLEAIHLPKRVAIIHCPGHQRGTDPVATGNRKADEAAKQAAQSTRILTETTKNAGKRTADGSEFEKRTADGSEFESPKKKAKVE

SEQ ID NO: 7419 - protein, 2094 aa, synthetic construct
MPAAKRVKLDGGDKKYSIGLDIGTNSVGWAVITDEYKVPSKKFKVLGNTDRHSIKKNLIGALLFDSGETAEATRLKRTARRRYTRRKNRICYLQEIFSNEMAKVDDSFFHRLEESFLVEEDKKHERHPIFGNIVDEVAYHEKYPTIYHLRKKLVDSTDKADLRLIYLALAHMIKFRGHFLIEGDLNPDNSDVDKLFIQLVQTYNQLFEENPINASGVDAKAILSARLSKSRRLENLIAQLPGEKKNGLFGNLIALSLGLTPNFKSNFDLAEDAKLQLSKDTYDDDLDNLLAQIGDQYADLFLAAKNLSDAILLSDILRVNTEITKAPLSASMIKRYDEHHQDLTLLKALVRQQLPEKYKEIFFDQSKNGYAGYIDGGASQEEFYKFIKPILEKMDGTEELLVKLNREDLLRKQRTFDNGSIPHQIHLGELHAILRRQEDFYPFLKDNREKIEKILTFRIPYYVGPLARGNSRFAWMTRKSEETITPWNFEEVVDKGASAQSFIERMTNFDKNLPNEKVLPKHSLLYEYFTVYNELTKVKYVTEGMRKPAFLSGEQKKAIVDLLFKTNRKVTVKQLKEDYFKKIECFDSVEISGVEDRFNASLGTYHDLLKIIKDKDFLDNEENEDILEDIVLTLTLFEDREMIEERLKTYAHLFDDKVMKQLKRRRYTGWGRLSRKLINGIRDKQSGKTILDFLKSDGFANRNFMQLIHDDSLTFKEDIQKAQVSGQGDSLHEHIANLAGSPAIKKGILQTVKVVDELVKVMGRHKPENIVIEMARENQTTQKGQKNSRERMKRIEEGIKELGSQILKEHPVENTQLQNEKLYLYYLQNGRDMYVDQELDINRLSDYDVDHIVPQSFLKDDSIDNKVLTRSDKARGKSDNVPSEEVVKKMKNYWRQLLNAKLITQRKFDNLTKAERGGLSELDKAGFIKRQLVETRQITKHVAQILDSRMNTKYDENDKLIREVKVITLKSKLVSDFRKDFQFYKVREINNYHHAHDAYLNAVVGTALIKKYPKLESEFVYGDYKVYDVRKMIAKSEQEIGKATAKYFFYSNIMNFFKTEITLANGEIRKRPLIETNGETGEIVWDKGRDFATVRKVLSMPQVNIVKKTEVQTGGFSKESILPKRNSDKLIARKKDWDPKKYGGFDSPTVAYSVLVVAKVEKGKSKKLKSVKELLGITIMERSSFEKNPIDFLEAKGYKEVKKDLIIKLPKYSLFELENGRKRMLASAGELQKGNELALPSKYVNFLYLASHYEKLKGSPEDNEQKQLFVEQHKHYLDEIIEQISEFSKRVILADANLDKVLSAYNKHRDKPIREQAENIIHLFTLTNLGAPAAFKYFDTTIDRKRYTSTKEVLDATLIHQSITGLYETRIDLSQLGGDGGPAPGGGGSSGGTLNLEDEYRLYETSAEPEVSPGSTWLSDFPQAWAETGGMGLAVRQAPLIIPLKATSTPVSIKQYPMSQEAKLGIKPHIQRLLDQGILVPCQSPWNTPLLPVKKPGTNDYRPVQDLREVNKRVEDIHPTVPNPYNLLSGLPPSHRWYTVLDLKDAFFCLRLHPTSQPLFAFEWRDPGMGISGQLTWTRLPQGFKNSPTLFNEALHRDLADFRIQHPDLILLQYVDDILLAATSELDCQQGTRALLLTLGNLGYRASAKKAQLCQKQVKYLGYLLKEGQRWLTEARKETVMGQPTPKTPRQLREFLGTAGFCRLWIPGFAEMAAPLYPLTKPGTLFNWGPDQQKAYQEIKQALLTAPALGLPDLTKPFELFVDEKQGYAKGVLTQKLGPWRRPVAYLSKKLDPVAAGWPPCLRMVAAIAVLRKDAGKLTMGQPLVILAPHAVEALVKQPPDRWLSNARMTHYQAMLLDTDRVQFGPVVALNPATLLPLPEEGAPHDCLEILAETHGTRPDLTDQPIPDADHTWYTDGSSFLQEGQRKAGAAVTTETEVIWARALPAGTSAQRAELIALTQALKMAEGKRLNVYTDSRYAFATAHIHGEIYRRRGWLTSEGREIKNKSEILALLKALFLPKRLSIIHCLGHQKGDSAEARGNRLADQAAREAAIKTPPDTSTLLAGKRTADGSEFEKRTADGSEFESPKKKAKVE

SEQ ID NO: 7420 - protein, 2094 aa, synthetic construct
MPAAKRVKLDGGDKKYSIGLDIGTNSVGWAVITDEYKVPSKKFKVLGNTDRHSIKKNLIGALLFDSGETAEATRLKRTARRRYTRRKNRICYLQEIFSNEMAKVDDSFFHRLEESFLVEEDKKHERHPIFGNIVDEVAYHEKYPTIYHLRKKLVDSTDKADLRLIYLALAHMIKFRGHFLIEGDLNPDNSDVDKLFIQLVQTYNQLFEENPINASGVDAKAILSARLSKSRRLENLIAQLPGEKKNGLFGNLIALSLGLTPNFKSNFDLAEDAKLQLSKDTYDDDLDNLLAQIGDQYADLFLAAKNLSDAILLSDILRVNTEITKAPLSASMIKRYDEHHQDLTLLKALVRQQLPEKYKEIFFDQSKNGYAGYIDGGASQEEFYKFIKPILEKMDGTEELLVKLNREDLLRKQRTFDNGSIPHQIHLGELHAILRRQEDFYPFLKDNREKIEKILTFRIPYYVGPLARGNSRFAWMTRKSEETITPWNFEEVVDKGASAQSFIERMTNFDKNLPNEKVLPKHSLLYEYFTVYNELTKVKYVTEGMRKPAFLSGEQKKAIVDLLFKTNRKVTVKQLKEDYFKKIECFDSVEISGVEDRFNASLGTYHDLLKIIKDKDFLDNEENEDILEDIVLTLTLFEDREMIEERLKTYAHLFDDKVMKQLKRRRYTGWGRLSRKLINGIRDKQSGKTILDFLKSDGFANRNFMQLIHDDSLTFKEDIQKAQVSGQGDSLHEHIANLAGSPAIKKGILQTVKVVDELVKVMGRHKPENIVIEMARENQTTQKGQKNSRERMKRIEEGIKELGSQILKEHPVENTQLQNEKLYLYYLQNGRDMYVDQELDINRLSDYDVDHIVPQSFLKDDSIDNKVLTRSDKARGKSDNVPSEEVVKKMKNYWRQLLNAKLITQRKFDNLTKAERGGLSELDKAGFIKRQLVETRQITKHVAQILDSRMNTKYDENDKLIREVKVITLKSKLVSDFRKDFQFYKVREINNYHHAHDAYLNAVVGTALIKKYPKLESEFVYGDYKVYDVRKMIAKSEQEIGKATAKYFFYSNIMNFFKTEITLANGEIRKRPLIETNGETGEIVWDKGRDFATVRKVLSMPQVNIVKKTEVQTGGFSKESILPKRNSDKLIARKKDWDPKKYGGFDSPTVAYSVLVVAKVEKGKSKKLKSVKELLGITIMERSSFEKNPIDFLEAKGYKEVKKDLIIKLPKYSLFELENGRKRMLASAGELQKGNELALPSKYVNFLYLASHYEKLKGSPEDNEQKQLFVEQHKHYLDEIIEQISEFSKRVILADANLDKVLSAYNKHRDKPIREQAENIIHLFTLTNLGAPAAFKYFDTTIDRKRYTSTKEVLDATLIHQSITGLYETRIDLSQLGGDGGPAPGGGGSSGGTLGIEDEYRLHETSTEPDVSLGSTWLSDFPQAWAETGGMGLAVRQAPLIIPLKATSTPVSIQQYPMSHEARLGIKPHIQRLLDQGILVPCQSPWNTPLLPVKKPGTNDYRPVQDLREVNKRVEDIHPTVPNPYNLLSGLPPSHQWYTVLDLKDAFFCLRLHPTSQPLFAFEWRDPGMGISGQLTWTRLPQGFKNSPTLFDEALHRDLADFRIQHPDLILLQYVDDILLAATSELDCQQGTRALLQTLGDLGYRASAKKAQICQKQVKYLGYLLREGQRWLTEARKETVMGQPVPKTPRQLREFLGTAGFCRLWIPGFAEMAAPLYPLTKTGTLFSWGPDQQKAYQEIKQALLTAPALGLPDLTKPFELFVDEKQGYAKGVLTQKLGPWRRPVAYLSKKLDPVAAGWPPCLRMVAAIAVLTKDAGKLTMGQPLVILAPHAVEALVKQPPDRWLSNARMTHYQAMLLDTDRVQFGPVVALNPATLLPLPEEGAPHDCLEILAETHGTRPDLTDQPIPDADHTWYTDGSSFLQEGQRKAGAAVTTETEVIWAGALPAGTSAQRAELIALTQALKMAEGKRLNVYTDSRYAFATAHIHGEIYRRRGLLTSEGREIKNKSEILALLKALFLPKRLSIIHCLGHQKGDSAEARGNRLADQAAREAAIKTPPDTSTLLAGKRTADGSEFEKRTADGSEFESPKKKAKVE

SEQ ID NO: 7421 - protein, 2094 aa, synthetic construct
MPAAKRVKLDGGDKKYSIGLDIGTNSVGWAVITDEYKVPSKKFKVLGNTDRHSIKKNLIGALLFDSGETAEATRLKRTARRRYTRRKNRICYLQEIFSNEMAKVDDSFFHRLEESFLVEEDKKHERHPIFGNIVDEVAYHEKYPTIYHLRKKLVDSTDKADLRLIYLALAHMIKFRGHFLIEGDLNPDNSDVDKLFIQLVQTYNQLFEENPINASGVDAKAILSARLSKSRRLENLIAQLPGEKKNGLFGNLIALSLGLTPNFKSNFDLAEDAKLQLSKDTYDDDLDNLLAQIGDQYADLFLAAKNLSDAILLSDILRVNTEITKAPLSASMIKRYDEHHQDLTLLKALVRQQLPEKYKEIFFDQSKNGYAGYIDGGASQEEFYKFIKPILEKMDGTEELLVKLNREDLLRKQRTFDNGSIPHQIHLGELHAILRRQEDFYPFLKDNREKIEKILTFRIPYYVGPLARGNSRFAWMTRKSEETITPWNFEEVVDKGASAQSFIERMTNFDKNLPNEKVLPKHSLLYEYFTVYNELTKVKYVTEGMRKPAFLSGEQKKAIVDLLFKTNRKVTVKQLKEDYFKKIECFDSVEISGVEDRFNASLGTYHDLLKIIKDKDFLDNEENEDILEDIVLTLTLFEDREMIEERLKTYAHLFDDKVMKQLKRRRYTGWGRLSRKLINGIRDKQSGKTILDFLKSDGFANRNFMQLIHDDSLTFKEDIQKAQVSGQGDSLHEHIANLAGSPAIKKGILQTVKVVDELVKVMGRHKPENIVIEMARENQTTQKGQKNSRERMKRIEEGIKELGSQILKEHPVENTQLQNEKLYLYYLQNGRDMYVDQELDINRLSDYDVDHIVPQSFLKDDSIDNKVLTRSDKARGKSDNVPSEEVVKKMKNYWRQLLNAKLITQRKFDNLTKAERGGLSELDKAGFIKRQLVETRQITKHVAQILDSRMNTKYDENDKLIREVKVITLKSKLVSDFRKDFQFYKVREINNYHHAHDAYLNAVVGTALIKKYPKLESEFVYGDYKVYDVRKMIAKSEQEIGKATAKYFFYSNIMNFFKTEITLANGEIRKRPLIETNGETGEIVWDKGRDFATVRKVLSMPQVNIVKKTEVQTGGFSKESILPKRNSDKLIARKKDWDPKKYGGFDSPTVAYSVLVVAKVEKGKSKKLKSVKELLGITIMERSSFEKNPIDFLEAKGYKEVKKDLIIKLPKYSLFELENGRKRMLASAGELQKGNELALPSKYVNFLYLASHYEKLKGSPEDNEQKQLFVEQHKHYLDEIIEQISEFSKRVILADANLDKVLSAYNKHRDKPIREQAENIIHLFTLTNLGAPAAFKYFDTTIDRKRYTSTKEVLDATLIHQSITGLYETRIDLSQLGGDGGPAPGGGGSSGGTLGIEDEYRLHETSTEPDVSLGSTWLSDFPQAWAETGGMGLAVRQAPLIIPLKATSTPVSIQQYPMSHEARLGIKPHIQRLLDQGILVPCQSPWNTPLLPVKKPGTNDYRPVQDLREVNKRVEDIHPTVPNPYNLLSGLPPSHQWYTVLDLKDAFFCLRLHPTSQPLFAFEWRDPGMGISGQLTWTRLPQGFKNSPTLFNEALHRDLADFRIQHPDLILLQYVDDILLAATSELDCQQGTRALLQTLGDLGYRASAKKAQICQKQVKYLGYLLREGQRWLTEARKETVMGQPVPKTPRQLREFLGTAGFCRLWIPGFAEMAAPLYPLTKPGTLFSWGPDQQKAYQEIKQALLTAPALGLPDLTKPFELFVDEKQGYAKGVLTQKLGPWRRPVAYLSKKLDPVAAGWPPCLRMVAAIAVLTKDAGKLTMGQPLVILAPHAVEALVKQPPDRWLSNARMTHYQAMLLDTDRVQFGPVVALNPATLLPLPEEGAPHDCLEILAETHGTRPDLTDQPIPDADHTWYTDGSSFLQEGQRKAGAAVTTETEVIWAGALPAGTSAQRAELIALTQALKMAEGKRLNVYTDSRYAFATAHIHGEIYRRRGWLTSEGREIKNKSEILALLKALFLPKRLSIIHCLGHQKGDSAEARGNRLADQAAREAAIKTPPDTSTLLAGKRTADGSEFEKRTADGSEFESPKKKAKVE

SEQ ID NO: 7422 - protein, 2094 aa, synthetic construct; identical to SEQ ID NO: 7421

SEQ ID NO: 7423 - protein, 2094 aa, synthetic construct
MPAAKRVKLDGGDKKYSIGLDIGTNSVGWAVITDEYKVPSKKFKVLGNTDRHSIKKNLIGALLFDSGETAEATRLKRTARRRYTRRKNRICYLQEIFSNEMAKVDDSFFHRLEESFLVEEDKKHERHPIFGNIVDEVAYHEKYPTIYHLRKKLVDSTDKADLRLIYLALAHMIKFRGHFLIEGDLNPDNSDVDKLFIQLVQTYNQLFEENPINASGVDAKAILSARLSKSRRLENLIAQLPGEKKNGLFGNLIALSLGLTPNFKSNFDLAEDAKLQLSKDTYDDDLDNLLAQIGDQYADLFLAAKNLSDAILLSDILRVNTEITKAPLSASMIKRYDEHHQDLTLLKALVRQQLPEKYKEIFFDQSKNGYAGYIDGGASQEEFYKFIKPILEKMDGTEELLVKLNREDLLRKQRTFDNGSIPHQIHLGELHAILRRQEDFYPFLKDNREKIEKILTFRIPYYVGPLARGNSRFAWMTRKSEETITPWNFEEVVDKGASAQSFIERMTNFDKNLPNEKVLPKHSLLYEYFTVYNELTKVKYVTEGMRKPAFLSGEQKKAIVDLLFKTNRKVTVKQLKEDYFKKIECFDSVEISGVEDRFNASLGTYHDLLKIIKDKDFLDNEENEDILEDIVLTLTLFEDREMIEERLKTYAHLFDDKVMKQLKRRRYTGWGRLSRKLINGIRDKQSGKTILDFLKSDGFANRNFMQLIHDDSLTFKEDIQKAQVSGQGDSLHEHIANLAGSPAIKKGILQTVKVVDELVKVMGRHKPENIVIEMARENQTTQKGQKNSRERMKRIEEGIKELGSQILKEHPVENTQLQNEKLYLYYLQNGRDMYVDQELDINRLSDYDVDHIVPQSFLKDDSIDNKVLTRSDKARGKSDNVPSEEVVKKMKNYWRQLLNAKLITQRKFDNLTKAERGGLSELDKAGFIKRQLVETRQITKHVAQILDSRMNTKYDENDKLIREVKVITLKSKLVSDFRKDFQFYKVREINNYHHAHDAYLNAVVGTALIKKYPKLESEFVYGDYKVYDVRKMIAKSEQEIGKATAKYFFYSNIMNFFKTEITLANGEIRKRPLIETNGETGEIVWDKGRDFATVRKVLSMPQVNIVKKTEVQTGGFSKESILPKRNSDKLIARKKDWDPKKYGGFDSPTVAYSVLVVAKVEKGKSKKLKSVKELLGITIMERSSFEKNPIDFLEAKGYKEVKKDLIIKLPKYSLFELENGRKRMLASAGELQKGNELALPSKYVNFLYLASHYEKLKGSPEDNEQKQLFVEQHKHYLDEIIEQISEFSKRVILADANLDKVLSAYNKHRDKPIREQAENIIHLFTLTNLGAPAAFKYFDTTIDRKRYTSTKEVLDATLIHQSITGLYETRIDLSQLGGDGGPAPGGGGSSGGTLNIEDEYRLHETSKEPDVSLGSTWLSDFPQAWAETGGMGLAVRQAPLIIPLKATSTPVSIKQYPMSQEARLGIKPHIQRLLDQGILVPCQSPWNTPLLPVKKPGTNDYRPVQDLREVNKRVEDIHPTVPNPYNLLSGLPPSHQWYTVLDLKDAFFCLRLHPTSQPLFAFEWRDPEMGISGQLTWTRLPQGFKNSPTLFDEALHRDLAGFRIQHPDLILLQYVDDLLLAATSELDCQQGTRALLQTLGDLGYRASAKKAQICQKQVKYLGYLLKEGQRWLTEARKETVMGQPIPKTPRQLREFLGTAGFCRLWIPGFAEMAAPLYPLTKTGTLFNWGPDQQKAFQEIKQALLTAPALGLPDLTKPFELFVDEKQGYAKGVLTQKLGPWRRPVAYLSKKLDPVAAGWPPCLRMVAAIAVLTKDAGKLTMGQPLVILAPHAVEALVKQPPDRWLSNARMTHYQALLLDTDRVQFGPVVALNPATLLPLPEEGLQHDCLDILAEAHGTRSDLMDQPLPDADHTWYTDGSSFLQEGQRKAGAAVTTETEVIWARALPAGTSAQRAELIALTQALKMAEGKKLNVYTDSRYAFATAHIHGEIYRRRGLLTSEGKEIKNKDEILALLKALFLPKRLSIIHCPGHQKGNSAEARGNRMADQAAREVATRETPETSTLLAGKRTADGSEFEKRTADGSEFESPKKKAKVE

SEQ ID NO: 7424 - protein, 2094 aa, synthetic construct
MPAAKRVKLDGGDKKYSIGLDIGTNSVGWAVITDEYKVPSKKFKVLGNTDRHSIKKNLIGALLFDSGETAEATRLKRTARRRYTRRKNRICYLQEIFSNEMAKVDDSFFHRLEESFLVEEDKKHERHPIFGNIVDEVAYHEKYPTIYHLRKKLVDSTDKADLRLIYLALAHMIKFRGHFLIEGDLNPDNSDVDKLFIQLVQTYNQLFEENPINASGVDAKAILSARLSKSRRLENLIAQLPGEKKNGLFGNLIALSLGLTPNFKSNFDLAEDAKLQLSKDTYDDDLDNLLAQIGDQYADLFLAAKNLSDAILLSDILRVNTEITKAPLSASMIKRYDEHHQDLTLLKALVRQQLPEKYKEIFFDQSKNGYAGYIDGGASQEEFYKFIKPILEKMDGTEELLVKLNREDLLRKQRTFDNGSIPHQIHLGELHAILRRQEDFYPFLKDNREKIEKILTFRIPYYVGPLARGNSRFAWMTRKSEETITPWNFEEVVDKGASAQSFIERMTNFDKNLPNEKVLPKHSLLYEYFTVYNELTKVKYVTEGMRKPAFLSGEQKKAIVDLLFKTNRKVTVKQLKEDYFKKIECFDSVEISGVEDRFNASLGTYHDLLKIIKDKDFLDNEENEDILEDIVLTLTLFEDREMIEERLKTYAHLFDDKVMKQLKRRRYTGWGRLSRKLINGIRDKQSGKTILDFLKSDGFANRNFMQLIHDDSLTFKEDIQKAQVSGQGDSLHEHIANLAGSPAIKKGILQTVKVVDELVKVMGRHKPENIVIEMARENQTTQKGQKNSRERMKRIEEGIKELGSQILKEHPVENTQLQNEKLYLYYLQNGRDMYVDQELDINRLSDYDVDHIVPQSFLKDDSIDNKVLTRSDKARGKSDNVPSEEVVKKMKNYWRQLLNAKLITQRKFDNLTKAERGGLSELDKAGFIKRQLVETRQITKHVAQILDSRMNTKYDENDKLIREVKVITLKSKLVSDFRKDFQFYKVREINNYHHAHDAYLNAVVGTALIKKYPKLESEFVYGDYKVYDVRKMIAKSEQEIGKATAKYFFYSNIMNFFKTEITLANGEIRKRPLIETNGETGEIVWDKGRDFATVRKVLSMPQVNIVKKTEVQTGGFSKESILPKRNSDKLIARKKDWDPKKYGGFDSPTVAYSVLVVAKVEKGKSKKLKSVKELLGITIMERSSFEKNPIDFLEAKGYKEVKKDLIIKLPKYSLFELENGRKRMLASAGELQKGNELALPSKYVNFLYLASHYEKLKGSPEDNEQKQLFVEQHKHYLDEIIEQISEFSKRVILADANLDKVLSAYNKHRDKPIREQAENIIHLFTLTNLGAPAAFKYFDTTIDRKRYTSTKEVLDATLIHQSITGLYETRIDLSQLGGDGGPAPGGGGSSGGTLNIEDEYRLHETSKGPDVPLGSTWLSDFPQAWAETGGMGLAVRQAPLIIPLKATSTPVSIKQYPMSQEARLGIKPHIQRLLDQGILVPCQSPWNTPLLPVKKPGTNDYRPVQDLREVNKRVEDIHPTVPNPYNLLSGLPPSHQWYTVLDLKDAFFCLRLHPTSQSLFAFEWRDPEMGISGQLTWTRLPQGFKNSPTLFNEALHRDLADFRIQHPDLILLQYVDDLLLAATSELDCQQGTRALLQTLGDLGYRASAKKAQICQKQVKYLGYLLKEGQRWLTEARKETVMGQPTPKTPRQLREFLGKAGFCRLFIPGFAEMAAPLYPLTKPGTLFEWGPDQQKAYQEIKQALLTAPALGLPDLTKPFELFVDEKQGYAKGVLTQKLGPWRRPVAYLSKKLDPVAAGWPPCLRMVAAIAVLTKDAGKLTMGQPLVILAPHAVEALVKQPPDRWLSNARMTHYQALLLDTDRVQFGPIVALNPATLLPLPEEGLQHDCLDILAEAHGTRPDLTDQPLPDADHTWYTDGSSFLQEGQRKAGAAVTTETEVVWAKALPAGTSAQRAELIALTQALKMAEGKKLNVYTDSRYAFATAHIHGEIYRRRGWLTSEGKEIKNKDEILALLKALFLPKRLSIIHCPGHQKGNRAEARGNRMADQAAREVATRETPETSTLLAGKRTADGSEFEKRTADGSEFESPKKKAKVE

SEQ ID NO: 7425 - protein, 2094 aa, synthetic construct
MPAAKRVKLDGGDKKYSIGLDIGTNSVGWAVITDEYKVPSKKFKVLGNTDRHSIKKNLIGALLFDSGETAEATRLKRTARRRYTRRKNRICYLQEIFSNEMAKVDDSFFHRLEESFLVEEDKKHERHPIFGNIVDEVAYHEKYPTIYHLRKKLVDSTDKADLRLIYLALAHMIKFRGHFLIEGDLNPDNSDVDKLFIQLVQTYNQLFEENPINASGVDAKAILSARLSKSRRLENLIAQLPGEKKNGLFGNLIALSLGLTPNFKSNFDLAEDAKLQLSKDTYDDDLDNLLAQIGDQYADLFLAAKNLSDAILLSDILRVNTEITKAPLSASMIKRYDEHHQDLTLLKALVRQQLPEKYKEIFFDQSKNGYAGYIDGGASQEEFYKFIKPILEKMDGTEELLVKLNREDLLRKQRTFDNGSIPHQIHLGELHAILRRQEDFYPFLKDNREKIEKILTFRIPYYVGPLARGNSRFAWMTRKSEETITPWNFEEVVDKGASAQSFIERMTNFDKNLPNEKVLPKHSLLYEYFTVYNELTKVKYVTEGMRKPAFLSGEQKKAIVDLLFKTNRKVTVKQLKEDYFKKIECFDSVEISGVEDRFNASLGTYHDLLKIIKDKDFLDNEENEDILEDIVLTLTLFEDREMIEERLKTYAHLFDDKVMKQLKRRRYTGWGRLSRKLINGIRDKQSGKTILDFLKSDGFANRNFMQLIHDDSLTFKEDIQKAQVSGQGDSLHEHIANLAGSPAIKKGILQTVKVVDELVKVMGRHKPENIVIEMARENQTTQKGQKNSRERMKRIEEGIKELGSQILKEHPVENTQLQNEKLYLYYLQNGRDMYVDQELDINRLSDYDVDHIVPQSFLKDDSIDNKVLTRSDKARGKSDNVPSEEVVKKMKNYWRQLLNAKLITQRKFDNLTKAERGGLSELDKAGFIKRQLVETRQITKHVAQILDSRMNTKYDENDKLIREVKVITLKSKLVSDFRKDFQFYKVREINNYHHAHDAYLNAVVGTALIKKYPKLESEFVYGDYKVYDVRKMIAKSEQEIGKATAKYFFYSNIMNFFKTEITLANGEIRKRPLIETNGETGEIVWDKGRDFATVRKVLSMPQVNIVKKTEVQTGGFSKESILPKRNSDKLIARKKDWDPKKYGGFDSPTVAYSVLVVAKVEKGKSKKLKSVKELLGITIMERSSFEKNPIDFLEAKGYKEVKKDLIIKLPKYSLFELENGRKRMLASAGELQKGNELALPSKYVNFLYLASHYEKLKGSPEDNEQKQLFVEQHKHYLDEIIEQISEFSKRVILADANLDKVLSAYNKHRDKPIREQAENIIHLFTLTNLGAPAAFKYFDTTIDRKRYTSTKEVLDATLIHQSITGLYETRIDLSQLGGDGGPAPGGGGSSGGTLNIEDEHRLHETSKEPDVSLGSTWLSDFPQAWAETGGMGLAVRQAPLIIPLKATSTPVSIKQYPMSQEARLGIKPHIQRLLDQGILVPCQSPWNTPLLPVKKPGTNDYRPVQDLREVNKRVEDIHPTVPNPYNLLSGLPPSHQWYTVLDLKDAFFCLRLHPTSQPLFAFEWRDPEMGISGQLTWTRLPQGFKNSPTLFNEALHRDLADFRIQHPDLILLQYVDDLLLAATSELDCQQGTRALLQTLGNLGYRASAKKAQICQKQVKYLGYLLKEGQRWLTEARKETVMGQPTPKTPRQLREFLGTAGFCRLWIPGFAEMAAPLYPLTKPGTLFNWGPDQQKAYQEIKQALLTAPALGLPDLTKPFELFVDEKQGYAKGVLTQKLGPWRRPVAYLSKKLDPVAAGWPPCLRMVAAIAVLTKDAGKLTMGQPLVILAPHAVEALVKQPPDRWLSNARMTHYQALLLDTDRVQFGPVVALNPATLLPLPEEGLQHNCLDILAEAHGTRPDLTDQPLPDADHTWYTDGSSLLQEGQRKAGAAVTTETEVIWAKALPAGTSAQRAELIALTQALKMAEGKKLNVYTDSRYAFATAHIHGEIYRRRGWLTSEGKEIKNKDEILALLKALFLPKRLSIIHCPGHQKGHSAEARGNRMADQAARKAAITETPDTSTLLAGKRTADGSEFEKRTADGSEFESPKKKAKVE

SEQ ID NO: 7426 - protein, 2094 aa, synthetic construct; identical to SEQ ID NO: 7425

SEQ ID NO: 7427 - protein, 2114 aa, synthetic construct
MPAAKRVKLDGGDKKYSIGLDIGTNSVGWAVITDEYKVPSKKFKVLGNTDRHSIKKNLIGALLFDSGETAEATRLKRTARRRYTRRKNRICYLQEIFSNEMAKVDDSFFHRLEESFLVEEDKKHERHPIFGNIVDEVAYHEKYPTIYHLRKKLVDSTDKADLRLIYLALAHMIKFRGHFLIEGDLNPDNSDVDKLFIQLVQTYNQLFEENPINASGVDAKAILSARLSKSRRLENLIAQLPGEKKNGLFGNLIALSLGLTPNFKSNFDLAEDAKLQLSKDTYDDDLDNLLAQIGDQYADLFLAAKNLSDAILLSDILRVNTEITKAPLSASMIKRYDEHHQDLTLLKALVRQQLPEKYKEIFFDQSKNGYAGYIDGGASQEEFYKFIKPILEKMDGTEELLVKLNREDLLRKQRTFDNGSIPHQIHLGELHAILRRQEDFYPFLKDNREKIEKILTFRIPYYVGPLARGNSRFAWMTRKSEETITPWNFEEVVDKGASAQSFIERMTNFDKNLPNEKVLPKHSLLYEYFTVYNELTKVKYVTEGMRKPAFLSGEQKKAIVDLLFKTNRKVTVKQLKEDYFKKIECFDSVEISGVEDRFNASLGTYHDLLKIIKDKDFLDNEENEDILEDIVLTLTLFEDREMIEERLKTYAHLFDDKVMKQLKRRRYTGWGRLSRKLINGIRDKQSGKTILDFLKSDGFANRNFMQLIHDDSLTFKEDIQKAQVSGQGDSLHEHIANLAGSPAIKKGILQTVKVVDELVKVMGRHKPENIVIEMARENQTTQKGQKNSRERMKRIEEGIKELGSQILKEHPVENTQLQNEKLYLYYLQNGRDMYVDQELDINRLSDYDVDHIVPQSFLKDDSIDNKVLTRSDKARGKSDNVPSEEVVKKMKNYWRQLLNAKLITQRKFDNLTKAERGGLSELDKAGFIKRQLVETRQITKHVAQILDSRMNTKYDENDKLIREVKVITLKSKLVSDFRKDFQFYKVREINNYHHAHDAYLNAVVGTALIKKYPKLESEFVYGDYKVYDVRKMIAKSEQEIGKATAKYFFYSNIMNFFKTEITLANGEIRKRPLIETNGETGEIVWDKGRDFATVRKVLSMPQVNIVKKTEVQTGGFSKESILPKRNSDKLIARKKDWDPKKYGGFDSPTVAYSVLVVAKVEKGKSKKLKSVKELLGITIMERSSFEKNPIDFLEAKGYKEVKKDLIIKLPKYSLFELENGRKRMLASAGELQKGNELALPSKYVNFLYLASHYEKLKGSPEDNEQKQLFVEQHKHYLDEIIEQISEFSKRVILADANLDKVLSAYNKHRDKPIREQAENIIHLFTLTNLGAPAAFKYFDTTIDRKRYTSTKEVLDATLIHQSITGLYETRIDLSQLGGDGGPAPGGGGSSGGVQEISDSRPMLHIYLNGRRFLGLLDTGADKTCIAGRDWPANWPIHQTESSLQGLGMACGVARSSQPLRWQHEDKSGIIHPFVIPTLPFTLWGRDIMKDIKVRLMTDSPDDSQDLMIGAIESNLFADQISWKSDQPVWLNQWPLKQEKLQALQQLVTEQLQLGHLEESNSPWNTPVFVIKKKSGKWRLLQDLRAVNATMHDMGALQPGLPSPVAVPKGWEIIIIDLQDCFFNIKLHPEDCKRFAFSVPSPNFKRPYQRFQWKVLPQGMKNSPTLCQKFVDKAILTVRDKYQDSYIVHYMDDILLAHPSRSIVDEILTSMIQALNKHGLVVSTEKIQKYDNLKYLGTHIQGDSVSYQKLQIRTDKLRTLNDFQKLLGNINWIRPFLKLTTGELKPLFEILNPDSNPISTRKLTPEACKALQLMNERLSTARVKRLDLSQPWSLCILKTEYTPTACLWQDGVVEWIHLPHISPKVITPYDIFCTQLIIKGRHRSKELFSKDPDYIVVPYTKVQFDLLLQEKEDWPISLLGFLGEVHFHLPKDPLLTFTLQTAIIFPHMTSTTPLEKGIVIFTDGSANGRSVTYIQGREPIIKENTQNTAQQAEIVAVITAFEEVSQPFNLYTDSKYVTGLFPEIETATLSPRTKIYTELKHLQRLIHKRQEKFYIGHIRGHTGLPGPLAQGNAYADSLTRILTAAGKRTADGSEFEKRTADGSEFESPKKKAKVE

SEQ ID NO: 7428 - protein, 2114 aa, synthetic construct
MPAAKRVKLDGGDKKYSIGLDIGTNSVGWAVITDEYKVPSKKFKVLGNTDRHSIKKNLIGALLFDSGETAEATRLKRTARRRYTRRKNRICYLQEIFSNEMAKVDDSFFHRLEESFLVEEDKKHERHPIFGNIVDEVAYHEKYPTIYHLRKKLVDSTDKADLRLIYLALAHMIKFRGHFLIEGDLNPDNSDVDKLFIQLVQTYNQLFEENPINASGVDAKAILSARLSKSRRLENLIAQLPGEKKNGLFGNLIALSLGLTPNFKSNFDLAEDAKLQLSKDTYDDDLDNLLAQIGDQYADLFLAAKNLSDAILLSDILRVNTEITKAPLSASMIKRYDEHHQDLTLLKALVRQQLPEKYKEIFFDQSKNGYAGYIDGGASQEEFYKFIKPILEKMDGTEELLVKLNREDLLRKQRTFDNGSIPHQIHLGELHAILRRQEDFYPFLKDNREKIEKILTFRIPYYVGPLARGNSRFAWMTRKSEETITPWNFEEVVDKGASAQSFIERMTNFDKNLPNEKVLPKHSLLYEYFTVYNELTKVKYVTEGMRKPAFLSGEQKKAIVDLLFKTNRKVTVKQLKEDYFKKIECFDSVEISGVEDRFNASLGTYHDLLKIIKDKDFLDNEENEDILEDIVLTLTLFEDREMIEERLKTYAHLFDDKVMKQLKRRRYTGWGRLSRKLINGIRDKQSGKTILDFLKSDGFANRNFMQLIHDDSLTFKEDIQKAQVSGQGDSLHEHIANLAGSPAIKKGILQTVKVVDELVKVMGRHKPENIVIEMARENQTTQKGQKNSRERMKRIEEGIKELGSQILKEHPVENTQLQNEKLYLYYLQNGRDMYVDQELDINRLSDYDVDHIVPQSFLKDDSIDNKVLTRSDKARGKSDNVPSEEVVKKMKNYWRQLLNAKLITQRKFDNLTKAERGGLSELDKAGFIKRQLVETRQITKHVAQILDSRMNTKYDENDKLIREVKVITLKSKLVSDFRKDFQFYKVREINNYHHAHDAYLNAVVGTALIKKYPKLESEFVYGDYKVYDVRKMIAKSEQEIGKATAKYFFYSNIMNFFKTEITLANGEIRKRPLIETNGETGEIVWDKGRDFATVRKVLSMPQVNIVKKTEVQTGGFSKESILPKRNSDKLIARKKDWDPKKYGGFDSPTVAYSVLVVAKVEKGKSKKLKSVKELLGITIMERSSFEKNPIDFLEAKGYKEVKKDLIIKLPKYSLFELENGRKRMLASAGELQKGNELALPSKYVNFLYLASHYEKLKGSPEDNEQKQLFVEQHKHYLDEIIEQISEFSKRVILADANLDKVLSAYNKHRDKPIREQAENIIHLFTLTNLGAPAAFKYFDTTIDRKRYTSTKEVLDATLIHQSITGLYETRIDLSQLGGDGGPAPGGGGSSGGVQEISDSRPMLHIYLNGRRFLGLLDTGADKTCIAGRDWPANWPIHQTESSLQGLGMACGVARSSQPLRWQHEDKSGIIHPFVIPTLPFTLWGRDIMKDIKVRLMTDSPDDSQDLMIGAIESNLFADQISWKSDQPVWLNQWPLKQEKLQALQQLVTEQLQLGHLEESNSPWNTPVFVIKKKSGKWRLLQDLRAVNATMHDMGALQPGLPSPVAVPKGWEIIIIDLQDCFFNIKLHPEDCKRFAFSVPSPNFKRPYQRFQWKVLPQGMKNSPTLCQKFVDKAILTVRDKYQDSYIVHYMDDILLAHPSRSIVDEILTSMIQALNKHGLVVSTEKIQKYDNLKYLGTHIQGDSVSYQKLQIRTDKLRTLNDFQKLLGNINWIRPFLKLTTGELKPLFEILNGDSNPISTRKLTPEACKALQLMNERLSTARVKRLDLSQPWSLCILKTEYTPTACLWQDGVVEWIHLPHISPKVITPYDIFCTQLIIKGRHRSKELFSKDPDYIVVPYTKVQFDLLLQEKEDWPISLLGFLGEVHFHLPKDPLLTFTLQTAIIFPHMTSTTPLEKGIVIFTDGSANGRSVTYIQGREPIIKENTQNTAQQAEIVAVITAFEEVSQPFNLYTDSKYVTGLFPEIETATLSPRTKIYTELKHLQRLIHKRQEKFYIGHIRGHTGLPGPLAQGNAYADSLTRILTAAGKRTADGSEFEKRTADGSEFESPKKKAKVE

SEQ ID NO: 7429 - protein, 2086 aa, synthetic construct
MPAAKRVKLDGGDKKYSIGLDIGTNSVGWAVITDEYKVPSKKFKVLGNTDRHSIKKNLIGALLFDSGETAEATRLKRTARRRYTRRKNRICYLQEIFSNEMAKVDDSFFHRLEESFLVEEDKKHERHPIFGNIVDEVAYHEKYPTIYHLRKKLVDSTDKADLRLIYLALAHMIKFRGHFLIEGDLNPDNSDVDKLFIQLVQTYNQLFEENPINASGVDAKAILSARLSKSRRLENLIAQLPGEKKNGLFGNLIALSLGLTPNFKSNFDLAEDAKLQLSKDTYDDDLDNLLAQIGDQYADLFLAAKNLSDAILLSDILRVNTEITKAPLSASMIKRYDEHHQDLTLLKALVRQQLPEKYKEIFFDQSKNGYAGYIDGGASQEEFYKFIKPILEKMDGTEELLVKLNREDLLRKQRTFDNGSIPHQIHLGELHAILRRQEDFYPFLKDNREKIEKILTFRIPYYVGPLARGNSRFAWMTRKSEETITPWNFEEVVDKGASAQSFIERMTNFDKNLPNEKVLPKHSLLYEYFTVYNELTKVKYVTEGMRKPAFLSGEQKKAIVDLLFKTNRKVTVKQLKEDYFKKIECFDSVEISGVEDRFNASLGTYHDLLKIIKDKDFLDNEENEDILEDIVLTLTLFEDREMIEERLKTYAHLFDDKVMKQLKRRRYTGWGRLSRKLINGIRDKQSGKTILDFLKSDGFANRNFMQLIHDDSLTFKEDIQKAQVSGQGDSLHEHIANLAGSPAIKKGILQTVKVVDELVKVMGRHKPENIVIEMARENQTTQKGQKNSRERMKRIEEGIKELGSQILKEHPVENTQLQNEKLYLYYLQNGRDMYVDQELDINRLSDYDVDHIVPQSFLKDDSIDNKVLTRSDKARGKSDNVPSEEVVKKMKNYWRQLLNAKLITQRKFDNLTKAERGGLSELDKAGFIKRQLVETRQITKHVAQILDSRMNTKYDENDKLIREVKVITLKSKLVSDFRKDFQFYKVREINNYHHAHDAYLNAVVGTALIKKYPKLESEFVYGDYKVYDVRKMIAKSEQEIGKATAKYFFYSNIMNFFKTEITLANGEIRKRPLIETNGETGEIVWDKGRDFATVRKVLSMPQVNIVKKTEVQTGGFSKESILPKRNSDKLIARKKDWDPKKYGGFDSPTVAYSVLVVAKVEKGKSKKLKSVKELLGITIMERSSFEKNPIDFLEAKGYKEVKKDLIIKLPKYSLFELENGRKRMLASAGELQKGNELALPSKYVNFLYLASHYEKLKGSPEDNEQKQLFVEQHKHYLDEIIEQISEFSKRVILADANLDKVLSAYNKHRDKPIREQAENIIHLFTLTNLGAPAAFKYFDTTIDRKRYTSTKEVLDATLIHQSITGLYETRIDLSQLGGDGGPAPGGGGSSGGLDDEYRLYSPLVKPDQNIQFWLEQFPQAWAETAGMGLAKQVPPQVIQLKASATPVSVRQYPLSKEAQEGIRPHVQRLIQQGILVPVQSPWNTPLLPVRKPGTNDYRPVQDLREVNKRVQDIHPTVPNPYNLLCALPPQRSWYTVLDLKDAFFCLRLHPTSQPLFAFEWRDPGTGRTGQLTWTRLPQGFKNSPTIFNEALHRDLANFRIQHPQVTLLQYVDDLLLAGATKQDCLEGTKALLLELSDLGYRASAKKAQICRREVTYLGYSLRDGQRWLTEARKKTVVQIPAPTTAKQVREFLGKAGFCRLFIPGFATLAAPLYPLTKPKGEFSWAPEHQKAFDAIKKALLSAPALALPDVTKPFTLYVDERKGVARGVLTQTLGPWRRPVAYLSKKLDPVASGWPVCLKAIAAVAILVKDADKLTLGQNITVIAPHALENIVRQPPDRWMTNARMTHYQSLLLTERVTFAPPAALNPATLLPEETDEPVTHDCHQLLIEETGVRKDLTDIPLTGEVLTWFTDGSSYVVEGKRMAGAAVVDGTRTIWASSLPEGTSAQKAELMALTQALRLAEGKSINIYTDSRYAFATAHVHGAIYKQRGWLTSAGREIKNKEEILSLLEALHLPKRLAIIHCPGHQKAKDPISRGNQMADRVAKQAAQGVNLLPAGKRTADGSEFEKRTADGSEFESPKKKAKVE

SEQ ID NO: 7430 - protein, 2086 aa, synthetic construct; identical to SEQ ID NO: 7429

SEQ ID NO: 7431 - protein, 2085 aa, synthetic construct
MPAAKRVKLDGGDKKYSIGLDIGTNSVGWAVITDEYKVPSKKFKVLGNTDRHSIKKNLIGALLFDSGETAEATRLKRTARRRYTRRKNRICYLQEIFSNEMAKVDDSFFHRLEESFLVEEDKKHERHPIFGNIVDEVAYHEKYPTIYHLRKKLVDSTDKADLRLIYLALAHMIKFRGHFLIEGDLNPDNSDVDKLFIQLVQTYNQLFEENPINASGVDAKAILSARLSKSRRLENLIAQLPGEKKNGLFGNLIALSLGLTPNFKSNFDLAEDAKLQLSKDTYDDDLDNLLAQIGDQYADLFLAAKNLSDAILLSDILRVNTEITKAPLSASMIKRYDEHHQDLTLLKALVRQQLPEKYKEIFFDQSKNGYAGYIDGGASQEEFYKFIKPILEKMDGTEELLVKLNREDLLRKQRTFDNGSIPHQIHLGELHAILRRQEDFYPFLKDNREKIEKILTFRIPYYVGPLARGNSRFAWMTRKSEETITPWNFEEVVDKGASAQSFIERMTNFDKNLPNEKVLPKHSLLYEYFTVYNELTKVKYVTEGMRKPAFLSGEQKKAIVDLLFKTNRKVTVKQLKEDYFKKIECFDSVEISGVEDRFNASLGTYHDLLKIIKDKDFLDNEENEDILEDIVLTLTLFEDREMIEERLKTYAHLFDDKVMKQLKRRRYTGWGRLSRKLINGIRDKQSGKTILDFLKSDGFANRNFMQLIHDDSLTFKEDIQKAQVSGQGDSLHEHIANLAGSPAIKKGILQTVKVVDELVKVMGRHKPENIVIEMARENQTTQKGQKNSRERMKRIEEGIKELGSQILKEHPVENTQLQNEKLYLYYLQNGRDMYVDQELDINRLSDYDVDHIVPQSFLKDDSIDNKVLTRSDKARGKSDNVPSEEVVKKMKNYWRQLLNAKLITQRKFDNLTKAERGGLSELDKAGFIKRQLVETRQITKHVAQILDSRMNTKYDENDKLIREVKVITLKSKLVSDFRKDFQFYKVREINNYHHAHDAYLNAVVGTALIKKYPKLESEFVYGDYKVYDVRKMIAKSEQEIGKATAKYFFYSNIMNFFKTEITLANGEIRKRPLIETNGETGEIVWDKGRDFATVRKVLSMPQVNIVKKTEVQTGGFSKESILPKRNSDKLIARKKDWDPKKYGGFDSPTVAYSVLVVAKVEKGKSKKLKSVKELLGITIMERSSFEKNPIDFLEAKGYKEVKKDLIIKLPKYSLFELENGRKRMLASAGELQKGNELALPSKYVNFLYLASHYEKLKGSPEDNEQKQLFVEQHKHYLDEIIEQISEFSKRVILADANLDKVLSAYNKHRDKPIREQAENIIHLFTLTNLGAPAAFKYFDTTIDRKRYTSTKEVLDATLIHQSITGLYETRIDLSQLGGDGGPAPGGGGSSGGIPWLMKKPLQLTTLVPLQEYEERLLKQTMLTGSYKEKLQSLFLKYDALWQHWENQVGHRRIKPHHIATGTVNPRPQKQYPINPKAKASIQTVINDLLKQGVLIQQNSIMNTPVYPVPKPDGKWRMVLDYREVNKTIPLIAAQNQHSAGILSSIFRGKYKTTLDLSNGFWAHSITPESYWLTAFTWLGQQYCWTRLPQGFLNSPALFTADVVDLLKEVPNVQVYVDDIYISHDDPREHLEQLEKVFSLLLNAGYVVSLKKSEIAQHEVEFLGFNITKEGRGLTETFKQKLLNITPPRDLKQLQSILGLLNFARNFIPNFSELVKPLYNIIATANGKYITWTTDNSQQLQNIISMLNSAENLEERNPEVRLIMKVNTSPSAGYIRFYNEFAKRPIMYLNYVYTKAEVKFTNTEKLLTTIHKGLIKALDLGMGQEILVYSPIVSMTKIQKTPLPERKALPIRWITWMSYLEDPRIQFHYDKTLPELQQVPTVTDDIIAKIKHPSEFSMVFYTDGSAIKHPNVNKSHNAGMGIAQVQFKPEFTVINTWSIPLGDHTAQLAEVAAVEFACKKALKIDGPVLIVTDSFYVAESVNKELPYWQSNGFFNNKKKPLKHVSKWKSIADCIQLKPDIIIIHEKGHQPTASTFHTEGNNLADKLATQGSYVVNAGKRTADGSEFEKRTADGSEFESPKKKAKVE

SEQ ID NO: 7432 - protein, 2085 aa, synthetic construct
MPAAKRVKLDGGDKKYSIGLDIGTNSVGWAVITDEYKVPSKKFKVLGNTDRHSIKKNLIGALLFDSGETAEATRLKRTARRRYTRRKNRICYLQEIFSNEMAKVDDSFFHRLEESFLVEEDKKHERHPIFGNIVDEVAYHEKYPTIYHLRKKLVDSTDKADLRLIYLALAHMIKFRGHFLIEGDLNPDNSDVDKLFIQLVQTYNQLFEENPINASGVDAKAILSARLSKSRRLENLIAQLPGEKKNGLFGNLIALSLGLTPNFKSNFDLAEDAKLQLSKDTYDDDLDNLLAQIGDQYADLFLAAKNLSDAILLSDILRVNTEITKAPLSASMIKRYDEHHQDLTLLKALVRQQLPEKYKEIFFDQSKNGYAGYIDGGASQEEFYKFIKPILEKMDGTEELLVKLNREDLLRKQRTFDNGSIPHQIHLGELHAILRRQEDFYPFLKDNREKIEKILTFRIPYYVGPLARGNSRFAWMTRKSEETITPWNFEEVVDKGASAQSFIERMTNFDKNLPNEKVLPKHSLLYEYFTVYNELTKVKYVTEGMRKPAFLSGEQKKAIVDLLFKTNRKVTVKQLKEDYFKKIECFDSVEISGVEDRFNASLGTYHDLLKIIKDKDFLDNEENEDILEDIVLTLTLFEDREMIEERLKTYAHLFDDKVMKQLKRRRYTGWGRLSRKLINGIRDKQSGKTILDFLKSDGFANRNFMQLIHDDSLTFKEDIQKAQVSGQGDSLHEHIANLAGSPAIKKGILQTVKVVDELVKVMGRHKPENIVIEMARENQTTQKGQKNSRERMKRIEEGIKELGSQILKEHPVENTQLQNEKLYLYYLQNGRDMYVDQELDINRLSDYDVDHIVPQSFLKDDSIDNKVLTRSDKARGKSDNVPSEEVVKKMKNYWRQLLNAKLITQRKFDNLTKAERGGLSELDKAGFIKRQLVETRQITKHVAQILDSRMNTKYDENDKLIREVKVITLKSKLVSDFRKDFQFYKVREINNYHHAHDAYLNAVVGTALIKKYPKLESEFVYGDYKVYDVRKMIAKSEQEIGKATAKYFFYSNIMNFFKTEITLANGEIRKRPLIETNGETGEIVWDKGRDFATVRKVLSMPQVNIVKKTEVQTGGFSKESILPKRNSDKLIARKKDWDPKKYGGFDSPTVAYSVLVVAKVEKGKSKKLKSVKELLGITIMERSSFEKNPIDFLEAKGYKEVKKDLIIKLPKYSLFELENGRKRMLASAGELQKGNELALPSKYVNFLYLASHYEKLKGSPEDNEQKQLFVEQHKHYLDEIIEQISEFSKRVILADANLDKVLSAYNKHRDKPIREQAENIIHLFTLTNLGAPAAFKYFDTTIDRKRYTSTKEVLDATLIHQSITGLYETRIDLSQLGGDGGPAPGGGGSSGGIPWLMKKPLQLTTLVPLQEYEERLLKQTMLTGSYKEKLQSLFLKYDALWQHWENQVGHRRIKPHHIATGTVNPRPQKQYPINPKAKASIQTVINDLLKQGVLIQQNSIMNTPVYPVPKPDGKWRMVLDYREVNKTIPLIAAQNQHSAGILSSIFRGKYKTTLDLSNGFWAHSITPESYWLTAFTWLGQQYCWTRLPQGFLNSPALFNADVVDLLKEVPNVQVYVDDIYISHDDPREHLEQLEKVFSLLLNAGYVVSLKKSEIAQHEVEFLGFNITKEGRGLTETFKQKLLNITPPRDLKQLQSILGLLNFARNFIPNFSELVKPLYNIIATAPGKYITWTTDNSQQLQNIISMLNSAENLEERNPEVRLIMKVNTSPSAGYIRFYNEFAKRPIMYLNYVYTKAEVKFTNTEKLLTTIHKGLIKALDLGMGQEILVYSPIVSMTKIQKTPLPERKALPIRWITWMSYLEDPRIQFHYDKTLPELQQVPTVTDDIIAKIKHPSEFSMVFYTDGSAIKHPNVNKSHNAGMGIAQVQFKPEFTVINTWSIPLGDHTAQLAEVAAVEFACKKALKIDGPVLIVTDSFYVAESVNKELPYWQSNGFFNNKKKPLKHVSKWKSIADCIQLKPDIIIIHEKGHQPTASTFHTEGNNLADKLATQGSYVVNAGKRTADGSEFEKRTADGSEFESPKKKAKVE

SEQ ID NO: 7433 - protein, 2085 aa, synthetic construct
MPAAKRVKLDGGDKKYSIGLDIGTNSVGWAVITDEYKVPSKKFKVLGNTDRHSIKKNLIGALLFDSGETAEATRLKRTARRRYTRRKNRICYLQEIFSNEMAKVDDSFFHRLEESFLVEEDKKHERHPIFGNIVDEVAYHEKYPTIYHLRKKLVDSTDKADLRLIYLALAHMIKFRGHFLIEGDLNPDNSDVDKLFIQLVQTYNQLFEENPINASGVDAKAILSARLSKSRRLENLIAQLPGEKKNGLFGNLIALSLGLTPNFKSNFDLAEDAKLQLSKDTYDDDLDNLLAQIGDQYADLFLAAKNLSDAILLSDILRVNTEITKAPLSASMIKRYDEHHQDLTLLKALVRQQLPEKYKEIFFDQSKNGYAGYIDGGASQEEFYKFIKPILEKMDGTEELLVKLNREDLLRKQRTFDNGSIPHQIHLGELHAILRRQEDFYPFLKDNREKIEKILTFRIPYYVGPLARGNSRFAWMTRKSEETITPWNFEEVVDKGASAQSFIERMTNFDKNLPNEKVLPKHSLLYEYFTVYNELTKVKYVTEGMRKPAFLSGEQKKAIVDLLFKTNRKVTVKQLKEDYFKKIECFDSVEISGVEDRFNASLGTYHDLLKIIKDKDFLDNEENEDILEDIVLTLTLFEDREMIEERLKTYAHLFDDKVMKQLKRRRYTGWGRLSRKLINGIRDKQSGKTILDFLKSDGFANRNFMQLIHDDSLTFKEDIQKAQVSGQGDSLHEHIANLAGSPAIKKGILQTVKVVDELVKVMGRHKPENIVIEMARENQTTQKGQKNSRERMKRIEEGIKELGSQILKEHPVENTQLQNEKLYLYYLQNGRDMYVDQELDINRLSDYDVDHIVPQSFLKDDSIDNKVLTRSDKARGKSDNVPSEEVVKKMKNYWRQLLNAKLITQRKFDNLTKAERGGLSELDKAGFIKRQLVETRQITKHVAQILDSRMNTKYDENDKLIREVKVITLKSKLVSDFRKDFQFYKVREINNYHHAHDAYLNAVVGTALIKKYPKLESEFVYGDYKVYDVRKMIAKSEQEIGKATAKYFFYSNIMNFFKTEITLANGEIRKRPLIETNGETGEIVWDKGRDFATVRKVLSMPQVNIVKKTEVQTGGFSKESILPKRNSDKLIARKKDWDPKKYGGFDSPTVAYSVLVVAKVEKGKSKKLKSVKELLGITIMERSSFEKNPIDFLEAKGYKEVKKDLIIKLPKYSLFELENGRKRMLASAGELQKGNELALPSKYVNFLYLASHYEKLKGSPEDNEQKQLFVEQHKHYLDEIIEQISEFSKRVILADANLDKVLSAYNKHRDKPIREQAENIIHLFTLTNLGAPAAFKYFDTTIDRKRYTSTKEVLDATLIHQSITGLYETRIDLSQLGGDGGPAPGGGGSSGGIPWLMKKPLQLTTLVPLQEYEERLLKQTMLTGSYKEKLQSLFLKYDALWQHWENQVGHRRIKPHHIATGTVNPRPQKQYPINPKAKASIQTVINDLLKQGVLIQQNSIMNTPVYPVPKPDGKWRMVLDYREVNKTIPLIAAQNQHSAGILSSIFRGKYKTTLDLSNGFWAHSITPESYWLTAFTWLGQQYCWTRLPQGFLNSPALFNADVVDLLKEVPNVQVYVDDIYISHDDPREHLEQLEKVFSLLLNAGYVVSLKKSEIAQHEVEFLGFNITKEGRGLTETFKQKLLNITPPRDLKQLQSILGKLNFARNFIPNFSELVKPLYNIIATAPGKYITWTTDNSQQLQNIISMLNSAENLEERNPEVRLIMKVNTSPSAGYIRFYNEFAKRPIMYLNYVYTKAEVKFTNTEKLLTTIHKGLIKALDLGMGQEILVYSPIVSMTKIQKTPLPERKALPIRWITWMSYLEDPRIQFHYDKTLPELQQVPTVTDDIIAKIKHPSEFSMVFYTDGSAIKHPNVNKSHNAGMGIAQVQFKPEFTVINTWSIPLGDHTAQLAEVAAVEFACKKALKIDGPVLIVTDSFYVAESVNKELPYWQSNGFFNNKKKPLKHVSKWKSIADCIQLKPDIIIIHEKGHQPTASTFHTEGNNLADKLATQGSYVVNAGKRTADGSEFEKRTADGSEFESPKKKAKVE

SEQ ID NO: 7434 - protein, 2174 aa, synthetic construct
MPAAKRVKLDGGDKKYSIGLDIGTNSVGWAVITDEYKVPSKKFKVLGNTDRHSIKKNLIGALLFDSGETAEATRLKRTARRRYTRRKNRICYLQEIFSNEMAKVDDSFFHRLEESFLVEEDKKHERHPIFGNIVDEVAYHEKYPTIYHLRKKLVDSTDKADLRLIYLALAHMIKFRGHFLIEGDLNPDNSDVDKLFIQLVQTYNQLFEENPINASGVDAKAILSARLSKSRRLENLIAQLPGEKKNGLFGNLIALSLGLTPNFKSNFDLAEDAKLQLSKDTYDDDLDNLLAQIGDQYADLFLAAKNLSDAILLSDILRVNTEITKAPLSASMIKRYDEHHQDLTLLKALVRQQLPEKYKEIFFDQSKNGYAGYIDGGASQEEFYKFIKPILEKMDGTEELLVKLNREDLLRKQRTFDNGSIPHQIHLGELHAILRRQEDFYPFLKDNREKIEKILTFRIPYYVGPLARGNSRFAWMTRKSEETITPWNFEEVVDKGASAQSFIERMTNFDKNLPNEKVLPKHSLLYEYFTVYNELTKVKYVTEGMRKPAFLSGEQKKAIVDLLFKTNRKVTVKQLKEDYFKKIECFDSVEISGVEDRFNASLGTYHDLLKIIKDKDFLDNEENEDILEDIVLTLTLFEDREMIEERLKTYAHLFDDKVMKQLKRRRYTGWGRLSRKLINGIRDKQSGKTILDFLKSDGFANRNFMQLIHDDSLTFKEDIQKAQVSGQGDSLHEHIANLAGSPAIKKGILQTVKVVDELVKVMGRHKPENIVIEMARENQTTQKGQKNSRERMKRIEEGIKELGSQILKEHPVENTQLQNEKLYLYYLQNGRDMYVDQELDINRLSDYDVDHIVPQSFLKDDSIDNKVLTRSDKARGKSDNVPSEEVVKKMKNYWRQLLNAKLITQRKFDNLTKAERGGLSELDKAGFIKRQLVETRQITKHVAQILDSRMNTKYDENDKLIREVKVITLKSKLVSDFRKDFQFYKVREINNYHHAHDAYLNAVVGTALIKKYPKLESEFVYGDYKVYDVRKMIAKSEQEIGKATAKYFFYSNIMNFFKTEITLANGEIRKRPLIETNGETGEIVWDKGRDFATVRKVLSMPQVNIVKKTEVQTGGFSKESILPKRNSDKLIARKKDWDPKKYGGFDSPTVAYSVLVVAKVEKGKSKKLKSVKELLGITIMERSSFEKNPIDFLEAKGYKEVKKDLIIKLPKYSLFELENGRKRMLASAGELQKGNELALPSKYVNFLYLASHYEKLKGSPEDNEQKQLFVEQHKHYLDEIIEQISEFSKRVILADANLDKVLSAYNKHRDKPIREQAENIIHLFTLTNLGAPAAFKYFDTTIDRKRYTSTKEVLDATLIHQSITGLYETRIDLSQLGGDGGPAPGGGGSSGGMDPLQLLQPLEAEIKGTKLKAHWNSGATITCVPQAFLEEEVPIKNIWIKTIHGEKEQPVYYLTFKIQGRKVEAEVISSPYDYILVSPSDIPWLMKKPLQLTTLVPLQEYEERLLKQTMLTGSYKEKLQSLFLKYDALWQHWENQVGHRRIKPHHIATGTVNPRPQKQYPINPKAKASIQTVINDLLKQGVLIQQNSIMNTPVYPVPKPDGKWRMVLDYREVNKTIPLIAAQNQHSAGILSSIFRGKYKTTLDLSNGFWAHSITPESYWLTAFTWLGQQYCWTRLPQGFLNSPALFNADVVDLLKEVPNVQVYVDDIYISHDDPREHLEQLEKVFSLLLNAGYVVSLKKSEIAQHEVEFLGFNITKEGRGLTETFKQKLLNITPPRDLKQLQSILGKLNFARNFIPNFSELVKPLYNIIATAPGKYITWTTDNSQQLQNIISMLNSAENLEERNPEVRLIMKVNTSPSAGYIRFYNEFAKRPIMYLNYVYTKAEVKFTNTEKLLTTIHKGLIKALDLGMGQEILVYSPIVSMTKIQKTPLPERKALPIRWITWMSYLEDPRIQFHYDKTLPELQQVPTVTDDIIAKIKHPSEFSMVFYTDGSAIKHPNVNKSHNAGMGIAQVQFKPEFTVINTWSIPLGDHTAQLAEVAAVEFACKKALKIDGPVLIVTDSFYVAESVNKELPYWQSNGFFNNKKKPLKHVSKWKSIADCIQLKPDIIIIHEKGHQPTASTFHTEGNNLADKLATQGSYVVNAGKRTADGSEFEKRTADGSEFESPKKKAKVE

SEQ ID NO: 7435 - protein, 2092 aa, synthetic construct
MPAAKRVKLDGGDKKYSIGLDIGTNSVGWAVITDEYKVPSKKFKVLGNTDRHSIKKNLIGALLFDSGETAEATRLKRTARRRYTRRKNRICYLQEIFSNEMAKVDDSFFHRLEESFLVEEDKKHERHPIFGNIVDEVAYHEKYPTIYHLRKKLVDSTDKADLRLIYLALAHMIKFRGHFLIEGDLNPDNSDVDKLFIQLVQTYNQLFEENPINASGVDAKAILSARLSKSRRLENLIAQLPGEKKNGLFGNLIALSLGLTPNFKSNFDLAEDAKLQLSKDTYDDDLDNLLAQIGDQYADLFLAAKNLSDAILLSDILRVNTEITKAPLSASMIKRYDEHHQDLTLLKALVRQQLPEKYKEIFFDQSKNGYAGYIDGGASQEEFYKFIKPILEKMDGTEELLVKLNREDLLRKQRTFDNGSIPHQIHLGELHAILRRQEDFYPFLKDNREKIEKILTFRIPYYVGPLARGNSRFAWMTRKSEETITPWNFEEVVDKGASAQSFIERMTNFDKNLPNEKVLPKHSLLYEYFTVYNELTKVKYVTEGMRKPAFLSGEQKKAIVDLLFKTNRKVTVKQLKEDYFKKIECFDSVEISGVEDRFNASLGTYHDLLKIIKDKDFLDNEENEDILEDIVLTLTLFEDREMIEERLKTYAHLFDDKVMKQLKRRRYTGWGRLSRKLINGIRDKQSGKTILDFLKSDGFANRNFMQLIHDDSLTFKEDIQKAQVSGQGDSLHEHIANLAGSPAIKKGILQTVKVVDELVKVMGRHKPENIVIEMARENQTTQKGQKNSRERMKRIEEGIKELGSQILKEHPVENTQLQNEKLYLYYLQNGRDMYVDQELDINRLSDYDVDHIVPQSFLKDDSIDNKVLTRSDKARGKSDNVPSEEVVKKMKNYWRQLLNAKLITQRKFDNLTKAERGGLSELDKAGFIKRQLVETRQITKHVAQILDSRMNTKYDENDKLIREVKVITLKSKLVSDFRKDFQFYKVREINNYHHAHDAYLNAVVGTALIKKYPKLESEFVYGDYKVYDVRKMIAKSEQEIGKATAKYFFYSNIMNFFKTEITLANGEIRKRPLIETNGETGEIVWDKGRDFATVRKVLSMPQVNIVKKTEVQTGGFSKESILPKRNSDKLIARKKDWDPKKYGGFDSPTVAYSVLVVAKVEKGKSKKLKSVKELLGITIMERSSFEKNPIDFLEAKGYKEVKKDLIIKLPKYSLFELENGRKRMLASAGELQKGNELALPSKYVNFLYLASHYEKLKGSPEDNEQKQLFVEQHKHYLDEIIEQISEFSKRVILADANLDKVLSAYNKHRDKPIREQAENIIHLFTLTNLGAPAAFKYFDTTIDRKRYTSTKEVLDATLIHQSITGLYETRIDLSQLGGDGGPAPGGGGSSGGVLNLEEEYRLHEKPVPSSIDPSWLQLFPTVWAERAGMGLANQVPPVVVELRSGASPVAVRQYPMSKEAREGIRPHIQRFLDLGVLVPCQSPWNTPLLPVKKPGTNDYRPVQDLREINKRVQDIHPTVPNPYNLLSSLPPSHTWYSVLDLKDAFFCLKLHPNSQPLFAFEWRDPEKGNTGQLTWTRLPQGFKNSPTLFNEALHRDLAPFRALNPQVVLLQYVDDLLVAAPTYRDCKEGTQKLLQELSKLGYRVSAKKAQLCQKEVTYLGYLLKEGKRWLTPARKATVMKIPPPTTPRQVREFLGTAGFCRLWIPGFASLAAPLYPLTKPSIPFIWTEEHQKAFDRIKEALLSAPALALPDLTKPFTLYVDERAGVARGVLTQTLGPWRRPVAYLSKKLDPVASGWPTCLKAVAAVALLLKDADKLTLGQNVTVIASHSLESIVRQPPDRWMTNARMTHYQSLLLNERVSFAPPAVLNPATLLPVESEATPVHRCSEILAEETGTRRDLKDQPLPGVPAWYTDGSSFIAEGKRRAGAAIVDGKRTVWASSLPEGTSAQKAELVALTQALRLAEGKDINIYTDSRYAFATAHIHGAIYKQRGWLTSAGKDIKNKEEILALLEAIHLPKRVAIIHCPGHQKGNDPVATGNRRADEAAKQAALSTRVLAETTKPAGKRTADGSEFEKRTADGSEFESPKKKAKVE

SEQ ID NO: 7436 - protein, 2094 aa, synthetic construct
MPAAKRVKLDGGDKKYSIGLDIGTNSVGWAVITDEYKVPSKKFKVLGNTDRHSIKKNLIGALLFDSGETAEATRLKRTARRRYTRRKNRICYLQEIFSNEMAKVDDSFFHRLEESFLVEEDKKHERHPIFGNIVDEVAYHEKYPTIYHLRKKLVDSTDKADLRLIYLALAHMIKFRGHFLIEGDLNPDNSDVDKLFIQLVQTYNQLFEENPINASGVDAKAILSARLSKSRRLENLIAQLPGEKKNGLFGNLIALSLGLTPNFKSNFDLAEDAKLQLSKDTYDDDLDNLLAQIGDQYADLFLAAKNLSDAILLSDILRVNTEITKAPLSASMIKRYDEHHQDLTLLKALVRQQLPEKYKEIFFDQSKNGYAGYIDGGASQEEFYKFIKPILEKMDGTEELLVKLNREDLLRKQRTFDNGSIPHQIHLGELHAILRRQEDFYPFLKDNREKIEKILTFRIPYYVGPLARGNSRFAWMTRKSEETITPWNFEEVVDKGASAQSFIERMTNFDKNLPNEKVLPKHSLLYEYFTVYNELTKVKYVTEGMRKPAFLSGEQKKAIVDLLFKTNRKVTVKQLKEDYFKKIECFDSVEISGVEDRFNASLGTYHDLLKIIKDKDFLDNEENEDILEDIVLTLTLFEDREMIEERLKTYAHLFDDKVMKQLKRRRYTGWGRLSRKLINGIRDKQSGKTILDFLKSDGFANRNFMQLIHDDSLTFKEDIQKAQVSGQGDSLHEHIANLAGSPAIKKGILQTVKVVDELVKVMGRHKPENIVIEMARENQTTQKGQKNSRERMKRIEEGIKELGSQILKEHPVENTQLQNEKLYLYYLQNGRDMYVDQELDINRLSDYDVDHIVPQSFLKDDSIDNKVLTRSDKARGKSDNVPSEEVVKKMKNYWRQLLNAKLITQRKFDNLTKAERGGLSELDKAGFIKRQLVETRQITKHVAQILDSRMNTKYDENDKLIREVKVITLKSKLVSDFRKDFQFYKVREINNYHHAHDAYLNAVVGTALIKKYPKLESEFVYGDYKVYDVRKMIAKSEQEIGKATAKYFFYSNIMNFFKTEITLANGEIRKRPLIETNGETGEIVWDKGRDFATVRKVLSMPQVNIVKKTEVQTGGFSKESILPKRNSDKLIARKKDWDPKKYGGFDSPTVAYSVLVVAKVEKGKSKKLKSVKELLGITIMERSSFEKNPIDFLEAKGYKEVKKDLIIKLPKYSLFELENGRKRMLASAGELQKGNELALPSKYVNFLYLASHYEKLKGSPEDNEQKQLFVEQHKHYLDEIIEQISEFSKRVILADANLDKVLSAYNKHRDKPIREQAENIIHLFTLTNLGAPAAFKYFDTTIDRKRYTSTKEVLDATLIHQSITGLYETRIDLSQLGGDGGPAPGGGGSSGGTLNIEDEYRLHETSKEPDVPLGSTWLSDFPQAWAETGGMGLAVRQAPLIIPLKATSTPVSIKQYPMSQEARLGIKPHIQRLLDQGILVPCQSPWNTPLLPVKKPGTNDYRPVQDLREVNKRVEDIHPTVPNPYNLLSGLPPSHQWYTVLDLKDAFFCLRLHPTSQPLFAFEWRDPEMGISGQLTWTRLPQGFKNSPTLFNEALHRDLADFRIQHPDLILLQYVDDLLLAATSEQDCQRGTRALLQTLGNLGYRASAKKAQICQKQVKYLGYLLKEGQRWLTEARKETVMGQPTPKTPRQLREFLGTAGFCRLWIPGFAEMAAPLYPLTKPGTLFNWGPDQQKAYQEIKQALLTAPALGLPDLTKPFELFVDEKQGYAKGVLTQKLGPWRRPVAYLSKKLDPVAAGWPPCLRMVAAIAVLTKDAGKLTMGQPLVILAPHAVEALVKQPPDRWLSNARMTHYQAMLLDTDRVQFGPVVALNPATLLPLPEKEAPHDCLEILAETHGTRPDLTDQPIPDADYTWYTDGSSFLQEGQRRAGAAVTTETEVIWARALPAGTSAQRAELIALTQALKMAEGKKLNVYTDSRYAFATAHVHGEIYRRRGWLTSEGREIKNKNEILALLKALFLPKRLSIIHCPGHQKGNSAEARGNRMADQAAREAAMKAVLETSTLLAGKRTADGSEFEKRTADGSEFESPKKKAKVE

SEQ ID NO: 7437 - protein, 2094 aa, synthetic construct
MPAAKRVKLDGGDKKYSIGLDIGTNSVGWAVITDEYKVPSKKFKVLGNTDRHSIKKNLIGALLFDSGETAEATRLKRTARRRYTRRKNRICYLQEIFSNEMAKVDDSFFHRLEESFLVEEDKKHERHPIFGNIVDEVAYHEKYPTIYHLRKKLVDSTDKADLRLIYLALAHMIKFRGHFLIEGDLNPDNSDVDKLFIQLVQTYNQLFEENPINASGVDAKAILSARLSKSRRLENLIAQLPGEKKNGLFGNLIALSLGLTPNFKSNFDLAEDAKLQLSKDTYDDDLDNLLAQIGDQYADLFLAAKNLSDAILLSDILRVNTEITKAPLSASMIKRYDEHHQDLTLLKALVRQQLPEKYKEIFFDQSKNGYAGYIDGGASQEEFYKFIKPILEKMDGTEELLVKLNREDLLRKQRTFDNGSIPHQIHLGELHAILRRQEDFYPFLKDNREKIEKILTFRIPYYVGPLARGNSRFAWMTRKSEETITPWNFEEVVDKGASAQSFIERMTNFDKNLPNEKVLPKHSLLYEYFTVYNELTKVKYVTEGMRKPAFLSGEQKKAIVDLLFKTNRKVTVKQLKEDYFKKIECFDSVEISGVEDRFNASLGTYHDLLKIIKDKDFLDNEENEDILEDIVLTLTLFEDREMIEERLKTYAHLFDDKVMKQLKRRRYTGWGRLSRKLINGIRDKQSGKTILDFLKSDGFANRNFMQLIHDDSLTFKEDIQKAQVSGQGDSLHEHIANLAGSPAIKKGILQTVKVVDELVKVMGRHKPENIVIEMARENQTTQKGQKNSRERMKRIEEGIKELGSQILKEHPVENTQLQNEKLYLYYLQNGRDMYVDQELDINRLSDYDVDHIVPQSFLKDDSIDNKVLTRSDKARGKSDNVPSEEVVKKMKNYWRQLLNAKLITQRKFDNLTKAERGGLSELDKAGFIKRQLVETRQITKHVAQILDSRMNTKYDENDKLIREVKVITLKSKLVSDFRKDFQFYKVREINNYHHAHDAYLNAVVGTALIKKYPKLESEFVYGDYKVYDVRKMIAKSEQEIGKATAKYFFYSNIMNFFKTEITLANGEIRKRPLIETNGETGEIVWDKGRDFATVRKVLSMPQVNIVKKTEVQTGGFSKESILPKRNSDKLIARKKDWDPKKYGGFDSPTVAYSVLVVAKVEKGKSKKLKSVKELLGITIMERSSFEKNPIDFLEAKGYKEVKKDLIIKLPKYSLFELENGRKRMLASAGELQKGNELALPSKYVNFLYLASHYEKLKGSPEDNEQKQLFVEQHKHYLDEIIEQISEFSKRVILADANLDKVLSAYNKHRDKPIREQAENIIHLFTLTNLGAPAAFKYFDTTIDRKRYTSTKEVLDATLIHQSITGLYETRIDLSQLGGDGGPAPGGGGSSGGTLNIEDEYRLHETSKEPDVPLGSTWLSDFPQAWAETGGMGLAVRQAPLIIPLKATSTPVSIKQYPMSQEARLGIKPHIQRLLDQGILVPCQSPWNTPLLPVKKPGTNDYRPVQDLREVNKRVEDIHPTVPNPYNLLSGLPPSHQWYTVLDLKDAFFCLRLHPTSQPLFAFEWRDPEMGISGQLTWTRLPQGFKNSPTLFNEALHRDLADFRIQHPDLILLQYVDDLLLAATSEQDCQRGTRALLQTLGNLGYRASAKKAQICQKQVKYLGYLLKEGQRWLTEARKETVMGQPTPKTPRQLREFLGKAGFCRLFIPGFAEMAAPLYPLTKPGTLFNWGPDQQKAYQEIKQALLTAPALGLPDLTKPFELFVDEKQGYAKGVLTQKLGPWRRPVAYLSKKLDPVAAGWPPCLRMVAAIAVLTKDAGKLTMGQPLVILAPHAVEALVKQPPDRWLSNARMTHYQAMLLDTDRVQFGPVVALNPATLLPLPEKEAPHDCLEILAETHGTRPDLTDQPIPDADYTWYTDGSSFLQEGQRRAGAAVTTETEVIWARALPAGTSAQRAELIALTQALKMAEGKKLNVYTDSRYAFATAHVHGEIYRRRGWLTSEGREIKNKNEILALLKALFLPKRLSIIHCPGHQKGNSAEARGNRMADQAAREAAMKAVLETSTLLAGKRTADGSEFEKRTADGSEFESPKKKAKVE

SEQ ID NO: 7438 - protein, 2096 aa, synthetic construct
MPAAKRVKLDGGDKKYSIGLDIGTNSVGWAVITDEYKVPSKKFKVLGNTDRHSIKKNLIGALLFDSGETAEATRLKRTARRRYTRRKNRICYLQEIFSNEMAKVDDSFFHRLEESFLVEEDKKHERHPIFGNIVDEVAYHEKYPTIYHLRKKLVDSTDKADLRLIYLALAHMIKFRGHFLIEGDLNPDNSDVDKLFIQLVQTYNQLFEENPINASGVDAKAILSARLSKSRRLENLIAQLPGEKKNGLFGNLIALSLGLTPNFKSNFDLAEDAKLQLSKDTYDDDLDNLLAQIGDQYADLFLAAKNLSDAILLSDILRVNTEITKAPLSASMIKRYDEHHQDLTLLKALVRQQLPEKYKEIFFDQSKNGYAGYIDGGASQEEFYKFIKPILEKMDGTEELLVKLNREDLLRKQRTFDNGSIPHQIHLGELHAILRRQEDFYPFLKDNREKIEKILTFRIPYYVGPLARGNSRFAWMTRKSEETITPWNFEEVVDKGASAQSFIERMTNFDKNLPNEKVLPKHSLLYEYFTVYNELTKVKYVTEGMRKPAFLSGEQKKAIVDLLFKTNRKVTVKQLKEDYFKKIECFDSVEISGVEDRFNASLGTYHDLLKIIKDKDFLDNEENEDILEDIVLTLTLFEDREMIEERLKTYAHLFDDKVMKQLKRRRYTGWGRLSRKLINGIRDKQSGKTILDFLKSDGFANRNFMQLIHDDSLTFKEDIQKAQVSGQGDSLHEHIANLAGSPAIKKGILQTVKVVDELVKVMGRHKPENIVIEMARENQTTQKGQKNSRERMKRIEEGIKELGSQILKEHPVENTQLQNEKLYLYYLQNGRDMYVDQELDINRLSDYDVDHIVPQSFLKDDSIDNKVLTRSDKARGKSDNVPSEEVVKKMKNYWRQLLNAKLITQRKFDNLTKAERGGLSELDKAGFIKRQLVETRQITKHVAQILDSRMNTKYDENDKLIREVKVITLKSKLVSDFRKDFQFYKVREINNYHHAHDAYLNAVVGTALIKKYPKLESEFVYGDYKVYDVRKMIAKSEQEIGKATAKYFFYSNIMNFFKTEITLANGEIRKRPLIETNGETGEIVWDKGRDFATVRKVLSMPQVNIVKKTEVQTGGFSKESILPKRNSDKLIARKKDWDPKKYGGFDSPTVAYSVLVVAKVEKGKSKKLKSVKELLGITIMERSSFEKNPIDFLEAKGYKEVKKDLIIKLPKYSLFELENGRKRMLASAGELQKGNELALPSKYVNFLYLASHYEKLKGSPEDNEQKQLFVEQHKHYLDEIIEQISEFSKRVILADANLDKVLSAYNKHRDKPIREQAENIIHLFTLTNLGAPAAFKYFDTTIDRKRYTSTKEVLDATLIHQSITGLYETRIDLSQLGGDGGPAPGSSGGGGGTAPLEEEYRLFLEAPIQNVTLLEQWKREIPKVWAEINPPGLASTQAPIHVQLLSTALPVRVRQYPITLEAKRSLRETIRKFRAAGILRPVHSPWNTPLLPVRKSGTSEYRMVQDLREVNKRVETIHPTVPNPYTLLSLLPPDRIWYSVLDLKDAFFCIPLAPESQLIFAFEWADAEEGESGQLTWTRLPQGFKNSPTLFNEALNRDLQGFRLDHPSVSLLQYVDDLLIAADTQAACLSATRDLLMTLAELGYRVSGKKAQLCQEEVTYLGFKIHKGSRSLSNSRTQAILQIPVPKTKRQVREFLGKIGYCRLFIPGFAELAQPLYAATRPGNDPLVWGEKEEEAFQSLKLALTQPPALALPSLDKPFQLFVEETSGAAKGVLTQALGPWKRPVAYLSKRLDPVAAGWPRCLRAIAAAALLTREASKLTFGQDIEITSSHNLESLLRSPPDKWLTNARITQYQVLLLDPPRVRFKQTAALNPATLLPETDDTLPIHHCLDTLDSLTSTRPDLTDQPLAQAEATLFTDGSSYIRDGKRYAGAAVVTLDSVIWAEPLPIGTSAQKAELIALTKALEWSKDKSVNIYTDSRYAFATLHVHGMIYRERGWLTAGGKAIKNAPEILALLTAVWLPKRVAVMHCKGHQKDDAPTSTGNRRADEVAREVAIRPLSTQATISAGKRTADGSEFEKRTADGSEFESPKKKAKVE

SEQ ID NO: 7439 - protein, 2171 aa, synthetic construct
MPAAKRVKLDGGDKKYSIGLDIGTNSVGWAVITDEYKVPSKKFKVLGNTDRHSIKKNLIGALLFDSGETAEATRLKRTARRRYTRRKNRICYLQEIFSNEMAKVDDSFFHRLEESFLVEEDKKHERHPIFGNIVDEVAYHEKYPTIYHLRKKLVDSTDKADLRLIYLALAHMIKFRGHFLIEGDLNPDNSDVDKLFIQLVQTYNQLFEENPINASGVDAKAILSARLSKSRRLENLIAQLPGEKKNGLFGNLIALSLGLTPNFKSNFDLAEDAKLQLSKDTYDDDLDNLLAQIGDQYADLFLAAKNLSDAILLSDILRVNTEITKAPLSASMIKRYDEHHQDLTLLKALVRQQLPEKYKEIFFDQSKNGYAGYIDGGASQEEFYKFIKPILEKMDGTEELLVKLNREDLLRKQRTFDNGSIPHQIHLGELHAILRRQEDFYPFLKDNREKIEKILTFRIPYYVGPLARGNSRFAWMTRKSEETITPWNFEEVVDKGASAQSFIERMTNFDKNLPNEKVLPKHSLLYEYFTVYNELTKVKYVTEGMRKPAFLSGEQKKAIVDLLFKTNRKVTVKQLKEDYFKKIECFDSVEISGVEDRFNASLGTYHDLLKIIKDKDFLDNEENEDILEDIVLTLTLFEDREMIEERLKTYAHLFDDKVMKQLKRRRYTGWGRLSRKLINGIRDKQSGKTILDFLKSDGFANRNFMQLIHDDSLTFKEDIQKAQVSGQGDSLHEHIANLAGSPAIKKGILQTVKVVDELVKVMGRHKPENIVIEMARENQTTQKGQKNSRERMKRIEEGIKELGSQILKEHPVENTQLQNEKLYLYYLQNGRDMYVDQELDINRLSDYDVDHIVPQSFLKDDSIDNKVLTRSDKARGKSDNVPSEEVVKKMKNYWRQLLNAKLITQRKFDNLTKAERGGLSELDKAGFIKRQLVETRQITKHVAQILDSRMNTKYDENDKLIREVKVITLKSKLVSDFRKDFQFYKVREINNYHHAHDAYLNAVVGTALIKKYPKLESEFVYGDYKVYDVRKMIAKSEQEIGKATAKYFFYSNIMNFFKTEITLANGEIRKRPLIETNGETGEIVWDKGRDFATVRKVLSMPQVNIVKKTEVQTGGFSKESILPKRNSDKLIARKKDWDPKKYGGFDSPTVAYSVLVVAKVEKGKSKKLKSVKELLGITIMERSSFEKNPIDFLEAKGYKEVKKDLIIKLPKYSLFELENGRKRMLASAGELQKGNELALPSKYVNFLYLASHYEKLKGSPEDNEQKQLFVEQHKHYLDEIIEQISEFSKRVILADANLDKVLSAYNKHRDKPIREQAENIIHLFTLTNLGAPAAFKYFDTTIDRKRYTSTKEVLDATLIHQSITGLYETRIDLSQLGGDGGPAPGSSGGGGGMDLLKPLTVERKGVKIKGYWNSQADITCVPKDLLQGEEPVRQQNVTTIHGTQEGDVYYVNLKIDGRRINTEVIGTTLDYAIITPGDVPWILKKPLELTIKLDLEEQQGTLLNNSILSKKGKEELKQLFEKYSALWQSWENQVGHRRIRPHKIATGTVKPTPQKQYHINPKAKPDIQIVINDLLKQGVLIQKESTMNTPVYPVPKPNGRWRMVLDYRAVNKVTPLIAVQNQHSYGILGSLFKGRYKTTIDLSNGFWAHPIVPEDYWITAFTWQGKQYCWTVLPQGFLNSPGLFTGDVVDLLQGIPNVEVYVDDVYISHDSEKEHLEYLDILFNRLKEAGYIISLKKSNIANSIVDFLGFQITNEGRGLTDTFKEKLENITAPTTLKQLQSILGLLNFARNFIPDFTELIAPLYALIPKSTKNYVPWQIEHSTTLETLITKLNGAEYLQGRKGDKTLIMKVNASYTTGYIRYYNEGEKKPISYVSIVFSKTELKFTELEKLLTTVHKGLLKALDLSMGQNIHVYSPIVSMQNIQKTPQTAKKALASRWLSWLSYLEDPRIRFFYDPQMPALKDLPAVDTGKDNKKHPSNFQHIFYTDGSAITSPTKEGHLNAGMGIVYFINKDGNLQKQQEWSISLGNHTAQFAEIAAFEFALKKCLPLGGNILVVTDSNYVAKAYNEELDVWASNGFVNNRKKPLKHISKWKSVADLKRLRPDVVVTHEPGHQKLDSSPHAYGNNLADQLATQASFKVHAGKRTADGSEFEKRTADGSEFESPKKKAKVE

SEQ ID NO: 7440 - protein, 2174 aa, synthetic construct
MPAAKRVKLDGGDKKYSIGLDIGTNSVGWAVITDEYKVPSKKFKVLGNTDRHSIKKNLIGALLFDSGETAEATRLKRTARRRYTRRKNRICYLQEIFSNEMAKVDDSFFHRLEESFLVEEDKKHERHPIFGNIVDEVAYHEKYPTIYHLRKKLVDSTDKADLRLIYLALAHMIKFRGHFLIEGDLNPDNSDVDKLFIQLVQTYNQLFEENPINASGVDAKAILSARLSKSRRLENLIAQLPGEKKNGLFGNLIALSLGLTPNFKSNFDLAEDAKLQLSKDTYDDDLDNLLAQIGDQYADLFLAAKNLSDAILLSDILRVNTEITKAPLSASMIKRYDEHHQDLTLLKALVRQQLPEKYKEIFFDQSKNGYAGYIDGGASQEEFYKFIKPILEKMDGTEELLVKLNREDLLRKQRTFDNGSIPHQIHLGELHAILRRQEDFYPFLKDNREKIEKILTFRIPYYVGPLARGNSRFAWMTRKSEETITPWNFEEVVDKGASAQSFIERMTNFDKNLPNEKVLPKHSLLYEYFTVYNELTKVKYVTEGMRKPAFLSGEQKKAIVDLLFKTNRKVTVKQLKEDYFKKIECFDSVEISGVEDRFNASLGTYHDLLKIIKDKDFLDNEENEDILEDIVLTLTLFEDREMIEERLKTYAHLFDDKVMKQLKRRRYTGWGRLSRKLINGIRDKQSGKTILDFLKSDGFANRNFMQLIHDDSLTFKEDIQKAQVSGQGDSLHEHIANLAGSPAIKKGILQTVKVVDELVKVMGRHKPENIVIEMARENQTTQKGQKNSRERMKRIEEGIKELGSQILKEHPVENTQLQNEKLYLYYLQNGRDMYVDQELDINRLSDYDVDHIVPQSFLKDDSIDNKVLTRSDKARGKSDNVPSEEVVKKMKNYWRQLLNAKLITQRKFDNLTKAERGGLSELDKAGFIKRQLVETRQITKHVAQILDSRMNTKYDENDKLIREVKVITLKSKLVSDFRKDFQFYKVREINNYHHAHDAYLNAVVGTALIKKYPKLESEFVYGDYKVYDVRKMIAKSEQEIGKATAKYFFYSNIMNFFKTEITLANGEIRKRPLIETNGETGEIVWDKGRDFATVRKVLSMPQVNIVKKTEVQTGGFSKESILPKRNSDKLIARKKDWDPKKYGGFDSPTVAYSVLVVAKVEKGKSKKLKSVKELLGITIMERSSFEKNPIDFLEAKGYKEVKKDLIIKLPKYSLFELENGRKRMLASAGELQKGNELALPSKYVNFLYLASHYEKLKGSPEDNEQKQLFVEQHKHYLDEIIEQISEFSKRVILADANLDKVLSAYNKHRDKPIREQAENIIHLFTLTNLGAPAAFKYFDTTIDRKRYTSTKEVLDATLIHQSITGLYETRIDLSQLGGDGGPAPGSSGGGGGMNPLQLLQPLPAEIKGTKLLAHWNSGATITCIPESFLEDEQPIKKTLIKTIHGEKQQNVYYVTFKVKGRKVEAEVIASPYEYILLSPTDVPWLTQQPLQLTILVPLQEYQEKILSKTALPEDQKQQLKTLFVKYDNLWQHWENQVGHRKIRPHNIATGDYPPRPQKQYPINPKAKPSIQIVIDDLLKQGVLTPQNSTMNTPVYPVPKPDGRWRMVLDYREVNKTIPLTAAQNQHSAGILATIVRQKYKTTLDLANGFWAHPITPESYWLTAFTWQGKQYCWTRLPQGFLNSPALFNADVVDLLKEIPNVQVYVDDIYLSHDDPKEHVQQLEKVFQILLQAGYVVSLKKSEIGQKTVEFLGFNITKEGRGLTDTFKTKLLNITPPKDLKQLQSILGKLNFARNFIPNFAELVQPLYNLIAPAKGKYIEWSEENTKQLNMVIEALNTASNLEERLPEQRLVIKVNTSPSAGYVRYYNETGKKPIMYLNYVFSKAELKFSMLEKLLTTMHKALIKAMDLAMGQEILVYSPIVSMTKIQKTPLPERKALPIRWITWMTYLEDPRIQFHYDKTLPELKHIPDVYTSSQSPVKHPSQYEGVFYTDGSAIKSPDPTKSNNAGMGIVHATYKPEYQVLNQWSIPLGNHTAQMAEIAAVEFACKKALKIPGPVLVITDSFYVAESANKELPYWKSNGFVNNKKKPLKHISKWKSIAECLSMKPDITIQHEKGISLQIPVFILKGNALADKLATQGSYVVNAGKRTADGSEFEKRTADGSEFESPKKKAKVE

SEQ ID NO: 7441 - protein, 2125 aa, synthetic construct
MPAAKRVKLDGGDKKYSIGLDIGTNSVGWAVITDEYKVPSKKFKVLGNTDRHSIKKNLIGALLFDSGETAEATRLKRTARRRYTRRKNRICYLQEIFSNEMAKVDDSFFHRLEESFLVEEDKKHERHPIFGNIVDEVAYHEKYPTIYHLRKKLVDSTDKADLRLIYLALAHMIKFRGHFLIEGDLNPDNSDVDKLFIQLVQTYNQLFEENPINASGVDAKAILSARLSKSRRLENLIAQLPGEKKNGLFGNLIALSLGLTPNFKSNFDLAEDAKLQLSKDTYDDDLDNLLAQIGDQYADLFLAAKNLSDAILLSDILRVNTEITKAPLSASMIKRYDEHHQDLTLLKALVRQQLPEKYKEIFFDQSKNGYAGYIDGGASQEEFYKFIKPILEKMDGTEELLVKLNREDLLRKQRTFDNGSIPHQIHLGELHAILRRQEDFYPFLKDNREKIEKILTFRIPYYVGPLARGNSRFAWMTRKSEETITPWNFEEVVDKGASAQSFIERMTNFDKNLPNEKVLPKHSLLYEYFTVYNELTKVKYVTEGMRKPAFLSGEQKKAIVDLLFKTNRKVTVKQLKEDYFKKIECFDSVEISGVEDRFNASLGTYHDLLKIIKDKDFLDNEENEDILEDIVLTLTLFEDREMIEERLKTYAHLFDDKVMKQLKRRRYTGWGRLSRKLINGIRDKQSGKTILDFLKSDGFANRNFMQLIHDDSLTFKEDIQKAQVSGQGDSLHEHIANLAGSPAIKKGILQTVKVVDELVKVMGRHKPENIVIEMARENQTTQKGQKNSRERMKRIEEGIKELGSQILKEHPVENTQLQNEKLYLYYLQNGRDMYVDQELDINRLSDYDVDHIVPQSFLKDDSIDNKVLTRSDKARGKSDNVPSEEVVKKMKNYWRQLLNAKLITQRKFDNLTKAERGGLSELDKAGFIKRQLVETRQITKHVAQILDSRMNTKYDENDKLIREVKVITLKSKLVSDFRKDFQFYKVREINNYHHAHDAYLNAVVGTALIKKYPKLESEFVYGDYKVYDVRKMIAKSEQEIGKATAKYFFYSNIMNFFKTEITLANGEIRKRPLIETNGETGEIVWDKGRDFATVRKVLSMPQVNIVKKTEVQTGGFSKESILPKRNSDKLIARKKDWDPKKYGGFDSPTVAYSVLVVAKVEKGKSKKLKSVKELLGITIMERSSFEKNPIDFLEAKGYKEVKKDLIIKLPKYSLFELENGRKRMLASAGELQKGNELALPSKYVNFLYLASHYEKLKGSPEDNEQKQLFVEQHKHYLDEIIEQISEFSKRVILADANLDKVLSAYNKHRDKPIREQAENIIHLFTLTNLGAPAAFKYFDTTIDRKRYTSTKEVLDATLIHQSITGLYETRIDLSQLGGDGGPAPGSSGGGGGLLGRDLLTKLKAQIQFSTEGPQVTWEDRPAMCLVLNLEEEYRLHEKPVPPSIDPSWLQLFPMVWAEKAGMGLANQVPPVVVELKSDASPVAVRQYPMSKEAREGIRPHIQRFLDLGILVPCQSPWNTPLLPVKKPGTNDYRPVQDLREVNKRVQDIHPTVPNPYNLLSSLPPSHTWYSVLDLKDAFFCLKLHPNSQPLFAFEWRDPEKGNTGQLTWTRLPQGFKNSPTLFNEALHRDLASFRALNPQVVMLQYVDDLLVAAPTYRDCKEGTRRLLQELSKLGYRVSAKKAQLCREEVTYLGYLLKGGKRWLTPARKATVMKIPTPTTPRQVREFLGTAGFCRLWIPGFASLAAPLYPLTRPKVPFTWTEAHQEAFGRIKEALLSAPALALPDLTKPFALYVDEKEGVARGVLTQTLGPWRRPVAYLSKKLDPVASGWPTCLKAIAAVALLLKDADKLTLGQNVLVIAPHNLESIVRQPPDRWMTNARMTHYQSLLLNERVSFAPPAILNPATLLPVESDDTPIHICSEILAEETGTRPDLRDQPLPGVPAWYTDGSSFIMDGRRQAGAAIVDNKRTVWASNLPEGTSAQKAELIALTQALRLAEGKSINIYTDSRYAFATAHVHGAIYKQRGWLTSAGKDIKNKEEILALLEAIHLPKRVAIIHCPGHQRGTDPVATGNRKADEAAKQAAQSTRILTETTKNAGKRTADGSEFEKRTADGSEFESPKKKAKVE

SEQ ID NO: 7442 - protein, 2094 aa, synthetic construct
MPAAKRVKLDGGDKKYSIGLDIGTNSVGWAVITDEYKVPSKKFKVLGNTDRHSIKKNLIGALLFDSGETAEATRLKRTARRRYTRRKNRICYLQEIFSNEMAKVDDSFFHRLEESFLVEEDKKHERHPIFGNIVDEVAYHEKYPTIYHLRKKLVDSTDKADLRLIYLALAHMIKFRGHFLIEGDLNPDNSDVDKLFIQLVQTYNQLFEENPINASGVDAKAILSARLSKSRRLENLIAQLPGEKKNGLFGNLIALSLGLTPNFKSNFDLAEDAKLQLSKDTYDDDLDNLLAQIGDQYADLFLAAKNLSDAILLSDILRVNTEITKAPLSASMIKRYDEHHQDLTLLKALVRQQLPEKYKEIFFDQSKNGYAGYIDGGASQEEFYKFIKPILEKMDGTEELLVKLNREDLLRKQRTFDNGSIPHQIHLGELHAILRRQEDFYPFLKDNREKIEKILTFRIPYYVGPLARGNSRFAWMTRKSEETITPWNFEEVVDKGASAQSFIERMTNFDKNLPNEKVLPKHSLLYEYFTVYNELTKVKYVTEGMRKPAFLSGEQKKAIVDLLFKTNRKVTVKQLKEDYFKKIECFDSVEISGVEDRFNASLGTYHDLLKIIKDKDFLDNEENEDILEDIVLTLTLFEDREMIEERLKTYAHLFDDKVMKQLKRRRYTGWGRLSRKLINGIRDKQSGKTILDFLKSDGFANRNFMQLIHDDSLTFKEDIQKAQVSGQGDSLHEHIANLAGSPAIKKGILQTVKVVDELVKVMGRHKPENIVIEMARENQTTQKGQKNSRERMKRIEEGIKELGSQILKEHPVENTQLQNEKLYLYYLQNGRDMYVDQELDINRLSDYDVDHIVPQSFLKDDSIDNKVLTRSDKARGKSDNVPSEEVVKKMKNYWRQLLNAKLITQRKFDNLTKAERGGLSELDKAGFIKRQLVETRQITKHVAQILDSRMNTKYDENDKLIREVKVITLKSKLVSDFRKDFQFYKVREINNYHHAHDAYLNAVVGTALIKKYPKLESEFVYGDYKVYDVRKMIAKSEQEIGKATAKYFFYSNIMNFFKTEITLANGEIRKRPLIETNGETGEIVWDKGRDFATVRKVLSMPQVNIVKKTEVQTGGFSKESILPKRNSDKLIARKKDWDPKKYGGFDSPTVAYSVLVVAKVEKGKSKKLKSVKELLGITIMERSSFEKNPIDFLEAKGYKEVKKDLIIKLPKYSLFELENGRKRMLASAGELQKGNELALPSKYVNFLYLASHYEKLKGSPEDNEQKQLFVEQHKHYLDEIIEQISEFSKRVILADANLDKVLSAYNKHRDKPIREQAENIIHLFTLTNLGAPAAFKYFDTTIDRKRYTSTKEVLDATLIHQSITGLYETRIDLSQLGGDGGPAPGSSGGGGGTLNLEDEYRLYETSAEPEVSPGSTWLSDFPQAWAETGGMGLAVRQAPLIIPLKATSTPVSIKQYPMSQEAKLGIKPHIQRLLDQGILVPCQSPWNTPLLPVKKPGTNDYRPVQDLREVNKRVEDIHPTVPNPYNLLSGLPPSHRWYTVLDLKDAFFCLRLHPTSQPLFAFEWRDPGMGISGQLTWTRLPQGFKNSPTLFNEALHRDLADFRIQHPDLILLQYVDDILLAATSELDCQQGTRALLLTLGNLGYRASAKKAQLCQKQVKYLGYLLKEGQRWLTEARKETVMGQPTPKTPRQLREFLGTAGFCRLWIPGFAEMAAPLYPLTKPGTLFNWGPDQQKAYQEIKQALLTAPALGLPDLTKPFELFVDEKQGYAKGVLTQKLGPWRRPVAYLSKKLDPVAAGWPPCLRMVAAIAVLRKDAGKLTMGQPLVILAPHAVEALVKQPPDRWLSNARMTHYQAMLLDTDRVQFGPVVALNPATLLPLPEEGAPHDCLEILAETHGTRPDLTDQPIPDADHTWYTDGSSFLQEGQRKAGAAVTTETEVIWARALPAGTSAQRAELIALTQALKMAEGKRLNVYTDSRYAFATAHIHGEIYRRRGWLTSEGREIKNKSEILALLKALFLPKRLSIIHCLGHQKGDSAEARGNRLADQAAREAAIKTPPDTSTLLAGKRTADGSEFEKRTADGSEFESPKKKAKVE

SEQ ID NO: 7443 - protein, 2094 aa, synthetic construct; identical to SEQ ID NO: 4533

SEQ ID NO: 7444 - protein, 2094 aa, synthetic construct
MPAAKRVKLDGGDKKYSIGLDIGTNSVGWAVITDEYKVPSKKFKVLGNTDRHSIKKNLIGALLFDSGETAEATRLKRTARRRYTRRKNRICYLQEIFSNEMAKVDDSFFHRLEESFLVEEDKKHERHPIFGNIVDEVAYHEKYPTIYHLRKKLVDSTDKADLRLIYLALAHMIKFRGHFLIEGDLNPDNSDVDKLFIQLVQTYNQLFEENPINASGVDAKAILSARLSKSRRLENLIAQLPGEKKNGLFGNLIALSLGLTPNFKSNFDLAEDAKLQLSKDTYDDDLDNLLAQIGDQYADLFLAAKNLSDAILLSDILRVNTEITKAPLSASMIKRYDEHHQDLTLLKALVRQQLPEKYKEIFFDQSKNGYAGYIDGGASQEEFYKFIKPILEKMDGTEELLVKLNREDLLRKQRTFDNGSIPHQIHLGELHAILRRQEDFYPFLKDNREKIEKILTFRIPYYVGPLARGNSRFAWMTRKSEETITPWNFEEVVDKGASAQSFIERMTNFDKNLPNEKVLPKHSLLYEYFTVYNELTKVKYVTEGMRKPAFLSGEQKKAIVDLLFKTNRKVTVKQLKEDYFKKIECFDSVEISGVEDRFNASLGTYHDLLKIIKDKDFLDNEENEDILEDIVLTLTLFEDREMIEERLKTYAHLFDDKVMKQLKRRRYTGWGRLSRKLINGIRDKQSGKTILDFLKSDGFANRNFMQLIHDDSLTFKEDIQKAQVSGQGDSLHEHIANLAGSPAIKKGILQTVKVVDELVKVMGRHKPENIVIEMARENQTTQKGQKNSRERMKRIEEGIKELGSQILKEHPVENTQLQNEKLYLYYLQNGRDMYVDQELDINRLSDYDVDHIVPQSFLKDDSIDNKVLTRSDKARGKSDNVPSEEVVKKMKNYWRQLLNAKLITQRKFDNLTKAERGGLSELDKAGFIKRQLVETRQITKHVAQILDSRMNTKYDENDKLIREVKVITLKSKLVSDFRKDFQFYKVREINNYHHAHDAYLNAVVGTALIKKYPKLESEFVYGDYKVYDVRKMIAKSEQEIGKATAKYFFYSNIMNFFKTEITLANGEIRKRPLIETNGETGEIVWDKGRDFATVRKVLSMPQVNIVKKTEVQTGGFSKESILPKRNSDKLIARKKDWDPKKYGGFDSPTVAYSVLVVAKVEKGKSKKLKSVKELLGITIMERSSFEKNPIDFLEAKGYKEVKKDLIIKLPKYSLFELENGRKRMLASAGELQKGNELALPSKYVNFLYLASHYEKLKGSPEDNEQKQLFVEQHKHYLDEIIEQISEFSKRVILADANLDKVLSAYNKHRDKPIREQAENIIHLFTLTNLGAPAAFKYFDTTIDRKRYTSTKEVLDATLIHQSITGLYETRIDLSQLGGDGGPAPGSSGGGGGTLNIEDEHRLHETSKEPDVSLGSTWLSDFPQAWAETGGMGLAVRQAPLIIPLKATSTPVSIKQYPMSQEARLGIKPHIQRLLDQGILVPCQSPWNTPLLPVKKPGTNDYRPVQDLREVNKRVEDIHPTVPNPYNLLSGLPPSHQWYTVLDLKDAFFCLRLHPTSQPLFAFEWRDPEMGISGQLTWTRLPQGFKNSPTLFNEALHRDLADFRIQHPDLILLQYVDDLLLAATSELDCQQGTRALLQTLGNLGYRASAKKAQICQKQVKYLGYLLKEGQRWLTEARKETVMGQPTPKTPRQLREFLGTAGFCRLWIPGFAEMAAPLYPLTKPGTLFNWGPDQQKAYQEIKQALLTAPALGLPDLTKPFELFVDEKQGYAKGVLTQKLGPWRRPVAYLSKKLDPVAAGWPPCLRMVAAIAVLTKDAGKLTMGQPLVILAPHAVEALVKQPPDRWLSNARMTHYQALLLDTDRVQFGPVVALNPATLLPLPEEGLQHNCLDILAEAHGTRPDLTDQPLPDADHTWYTDGSSLLQEGQRKAGAAVTTETEVIWAKALPAGTSAQRAELIALTQALKMAEGKKLNVYTDSRYAFATAHIHGEIYRRRGWLTSEGKEIKNKDEILALLKALFLPKRLSIIHCPGHQKGHSAEARGNRMADQAARKAAITETPDTSTLLAGKRTADGSEFEKRTADGSEFESPKKKAKVE

SEQ ID NO: 7445 - protein, 2094 aa, synthetic construct; identical to SEQ ID NO: 7444

SEQ ID NO: 7446 - protein, 2174 aa, synthetic construct
MPAAKRVKLDGGDKKYSIGLDIGTNSVGWAVITDEYKVPSKKFKVLGNTDRHSIKKNLIGALLFDSGETAEATRLKRTARRRYTRRKNRICYLQEIFSNEMAKVDDSFFHRLEESFLVEEDKKHERHPIFGNIVDEVAYHEKYPTIYHLRKKLVDSTDKADLRLIYLALAHMIKFRGHFLIEGDLNPDNSDVDKLFIQLVQTYNQLFEENPINASGVDAKAILSARLSKSRRLENLIAQLPGEKKNGLFGNLIALSLGLTPNFKSNFDLAEDAKLQLSKDTYDDDLDNLLAQIGDQYADLFLAAKNLSDAILLSDILRVNTEITKAPLSASMIKRYDEHHQDLTLLKALVRQQLPEKYKEIFFDQSKNGYAGYIDGGASQEEFYKFIKPILEKMDGTEELLVKLNREDLLRKQRTFDNGSIPHQIHLGELHAILRRQEDFYPFLKDNREKIEKILTFRIPYYVGPLARGNSRFAWMTRKSEETITPWNFEEVVDKGASAQSFIERMTNFDKNLPNEKVLPKHSLLYEYFTVYNELTKVKYVTEGMRKPAFLSGEQKKAIVDLLFKTNRKVTVKQLKEDYFKKIECFDSVEISGVEDRFNASLGTYHDLLKIIKDKDFLDNEENEDILEDIVLTLTLFEDREMIEERLKTYAHLFDDKVMKQLKRRRYTGWGRLSRKLINGIRDKQSGKTILDFLKSDGFANRNFMQLIHDDSLTFKEDIQKAQVSGQGDSLHEHIANLAGSPAIKKGILQTVKVVDELVKVMGRHKPENIVIEMARENQTTQKGQKNSRERMKRIEEGIKELGSQILKEHPVENTQLQNEKLYLYYLQNGRDMYVDQELDINRLSDYDVDHIVPQSFLKDDSIDNKVLTRSDKARGKSDNVPSEEVVKKMKNYWRQLLNAKLITQRKFDNLTKAERGGLSELDKAGFIKRQLVETRQITKHVAQILDSRMNTKYDENDKLIREVKVITLKSKLVSDFRKDFQFYKVREINNYHHAHDAYLNAVVGTALIKKYPKLESEFVYGDYKVYDVRKMIAKSEQEIGKATAKYFFYSNIMNFFKTEITLANGEIRKRPLIETNGETGEIVWDKGRDFATVRKVLSMPQVNIVKKTEVQTGGFSKESILPKRNSDKLIARKKDWDPKKYGGFDSPTVAYSVLVVAKVEKGKSKKLKSVKELLGITIMERSSFEKNPIDFLEAKGYKEVKKDLIIKLPKYSLFELENGRKRMLASAGELQKGNELALPSKYVNFLYLASHYEKLKGSPEDNEQKQLFVEQHKHYLDEIIEQISEFSKRVILADANLDKVLSAYNKHRDKPIREQAENIIHLFTLTNLGAPAAFKYFDTTIDRKRYTSTKEVLDATLIHQSITGLYETRIDLSQLGGDGGPAPGSSGGGGGMDPLQLLQPLEAEIKGTKLKAHWNSGATITCVPQAFLEEEVPIKNIWIKTIHGEKEQPVYYLTFKIQGRKVEAEVISSPYDYILVSPSDIPWLMKKPLQLTTLVPLQEYEERLLKQTMLTGSYKEKLQSLFLKYDALWQHWENQVGHRRIKPHHIATGTVNPRPQKQYPINPKAKASIQTVINDLLKQGVLIQQNSIMNTPVYPVPKPDGKWRMVLDYREVNKTIPLIAAQNQHSAGILSSIFRGKYKTTLDLSNGFWAHSITPESYWLTAFTWLGQQYCWTRLPQGFLNSPALFNADVVDLLKEVPNVQVYVDDIYISHDDPREHLEQLEKVFSLLLNAGYVVSLKKSEIAQHEVEFLGFNITKEGRGLTETFKQKLLNITPPRDLKQLQSILGKLNFARNFIPNFSELVKPLYNIIATAPGKYITWTTDNSQQLQNIISMLNSAENLEERNPEVRLIMKVNTSPSAGYIRFYNEFAKRPIMYLNYVYTKAEVKFTNTEKLLTTIHKGLIKALDLGMGQEILVYSPIVSMTKIQKTPLPERKALPIRWITWMSYLEDPRIQFHYDKTLPELQQVPTVTDDIIAKIKHPSEFSMVFYTDGSAIKHPNVNKSHNAGMGIAQVQFKPEFTVINTWSIPLGDHTAQLAEVAAVEFACKKALKIDGPVLIVTDSFYVAESVNKELPYWQSNGFFNNKKKPLKHVSKWKSIADCIQLKPDIIIIHEKGHQPTASTFHTEGNNLADKLATQGSYVVNAGKRTADGSEFEKRTADGSEFESPKKKAKVE

SEQ ID NO: 7447 - protein, 2094 aa, synthetic construct
MPAAKRVKLDGGDKKYSIGLDIGTNSVGWAVITDEYKVPSKKFKVLGNTDRHSIKKNLIGALLFDSGETAEATRLKRTARRRYTRRKNRICYLQEIFSNEMAKVDDSFFHRLEESFLVEEDKKHERHPIFGNIVDEVAYHEKYPTIYHLRKKLVDSTDKADLRLIYLALAHMIKFRGHFLIEGDLNPDNSDVDKLFIQLVQTYNQLFEENPINASGVDAKAILSARLSKSRRLENLIAQLPGEKKNGLFGNLIALSLGLTPNFKSNFDLAEDAKLQLSKDTYDDDLDNLLAQIGDQYADLFLAAKNLSDAILLSDILRVNTEITKAPLSASMIKRYDEHHQDLTLLKALVRQQLPEKYKEIFFDQSKNGYAGYIDGGASQEEFYKFIKPILEKMDGTEELLVKLNREDLLRKQRTFDNGSIPHQIHLGELHAILRRQEDFYPFLKDNREKIEKILTFRIPYYVGPLARGNSRFAWMTRKSEETITPWNFEEVVDKGASAQSFIERMTNFDKNLPNEKVLPKHSLLYEYFTVYNELTKVKYVTEGMRKPAFLSGEQKKAIVDLLFKTNRKVTVKQLKEDYFKKIECFDSVEISGVEDRFNASLGTYHDLLKIIKDKDFLDNEENEDILEDIVLTLTLFEDREMIEERLKTYAHLFDDKVMKQLKRRRYTGWGRLSRKLINGIRDKQSGKTILDFLKSDGFANRNFMQLIHDDSLTFKEDIQKAQVSGQGDSLHEHIANLAGSPAIKKGILQTVKVVDELVKVMGRHKPENIVIEMARENQTTQKGQKNSRERMKRIEEGIKELGSQILKEHPVENTQLQNEKLYLYYLQNGRDMYVDQELDINRLSDYDVDHIVPQSFLKDDSIDNKVLTRSDKARGKSDNVPSEEVVKKMKNYWRQLLNAKLITQRKFDNLTKAERGGLSELDKAGFIKRQLVETRQITKHVAQILDSRMNTKYDENDKLIREVKVITLKSKLVSDFRKDFQFYKVREINNYHHAHDAYLNAVVGTALIKKYPKLESEFVYGDYKVYDVRKMIAKSEQEIGKATAKYFFYSNIMNFFKTEITLANGEIRKRPLIETNGETGEIVWDKGRDFATVRKVLSMPQVNIVKKTEVQTGGFSKESILPKRNSDKLIARKKDWDPKKYGGFDSPTVAYSVLVVAKVEKGKSKKLKSVKELLGITIMERSSFEKNPIDFLEAKGYKEVKKDLIIKLPKYSLFELENGRKRMLASAGELQKGNELALPSKYVNFLYLASHYEKLKGSPEDNEQKQLFVEQHKHYLDEIIEQISEFSKRVILADANLDKVLSAYNKHRDKPIREQAENIIHLFTLTNLGAPAAFKYFDTTIDRKRYTSTKEVLDATLIHQSITGLYETRIDLSQLGGDGGPAPGSSGGGGGTLNIEDEYRLHETSKEPDVPLGSTWLSDFPQAWAETGGMGLAVRQAPLIIPLKATSTPVSIKQYPMSQEARLGIKPHIQRLLDQGILVPCQSPWNTPLLPVKKPGTNDYRPVQDLREVNKRVEDIHPTVPNPYNLLSGLPPSHQWYTVLDLKDAFFCLRLHPTSQPLFAFEWRDPEMGISGQLTWTRLPQGFKNSPTLFNEALHRDLADFRIQHPDLILLQYVDDLLLAATSEQDCQRGTRALLQTLGNLGYRASAKKAQICQKQVKYLGYLLKEGQRWLTEARKETVMGQPTPKTPRQLREFLGTAGFCRLWIPGFAEMAAPLYPLTKPGTLFNWGPDQQKAYQEIKQALLTAPALGLPDLTKPFELFVDEKQGYAKGVLTQKLGPWRRPVAYLSKKLDPVAAGWPPCLRMVAAIAVLTKDAGKLTMGQPLVILAPHAVEALVKQPPDRWLSNARMTHYQAMLLDTDRVQFGPVVALNPATLLPLPEKEAPHDCLEILAETHGTRPDLTDQPIPDADYTWYTDGSSFLQEGQRRAGAAVTTETEVIWARALPAGTSAQRAELIALTQALKMAEGKKLNVYTDSRYAFATAHVHGEIYRRRGWLTSEGREIKNKNEILALLKALFLPKRLSIIHCPGHQKGNSAEARGNRMADQAAREAAMKAVLETSTLLAGKRTADGSEFEKRTADGSEFESPKKKAKVE

SEQ ID NO: 7448 - protein, 2087 aa, synthetic construct
MPAAKRVKLDGGDKKYSIGLDIGTNSVGWAVITDEYKVPSKKFKVLGNTDRHSIKKNLIGALLFDSGETAEATRLKRTARRRYTRRKNRICYLQEIFSNEMAKVDDSFFHRLEESFLVEEDKKHERHPIFGNIVDEVAYHEKYPTIYHLRKKLVDSTDKADLRLIYLALAHMIKFRGHFLIEGDLNPDNSDVDKLFIQLVQTYNQLFEENPINASGVDAKAILSARLSKSRRLENLIAQLPGEKKNGLFGNLIALSLGLTPNFKSNFDLAEDAKLQLSKDTYDDDLDNLLAQIGDQYADLFLAAKNLSDAILLSDILRVNTEITKAPLSASMIKRYDEHHQDLTLLKALVRQQLPEKYKEIFFDQSKNGYAGYIDGGASQEEFYKFIKPILEKMDGTEELLVKLNREDLLRKQRTFDNGSIPHQIHLGELHAILRRQEDFYPFLKDNREKIEKILTFRIPYYVGPLARGNSRFAWMTRKSEETITPWNFEEVVDKGASAQSFIERMTNFDKNLPNEKVLPKHSLLYEYFTVYNELTKVKYVTEGMRKPAFLSGEQKKAIVDLLFKTNRKVTVKQLKEDYFKKIECFDSVEISGVEDRFNASLGTYHDLLKIIKDKDFLDNEENEDILEDIVLTLTLFEDREMIEERLKTYAHLFDDKVMKQLKRRRYTGWGRLSRKLINGIRDKQSGKTILDFLKSDGFANRNFMQLIHDDSLTFKEDIQKAQVSGQGDSLHEHIANLAGSPAIKKGILQTVKVVDELVKVMGRHKPENIVIEMARENQTTQKGQKNSRERMKRIEEGIKELGSQILKEHPVENTQLQNEKLYLYYLQNGRDMYVDQELDINRLSDYDVDHIVPQSFLKDDSIDNKVLTRSDKARGKSDNVPSEEVVKKMKNYWRQLLNAKLITQRKFDNLTKAERGGLSELDKAGFIKRQLVETRQITKHVAQILDSRMNTKYDENDKLIREVKVITLKSKLVSDFRKDFQFYKVREINNYHHAHDAYLNAVVGTALIKKYPKLESEFVYGDYKVYDVRKMIAKSEQEIGKATAKYFFYSNIMNFFKTEITLANGEIRKRPLIETNGETGEIVWDKGRDFATVRKVLSMPQVNIVKKTEVQTGGFSKESILPKRNSDKLIARKKDWDPKKYGGFDSPTVAYSVLVVAKVEKGKSKKLKSVKELLGITIMERSSFEKNPIDFLEAKGYKEVKKDLIIKLPKYSLFELENGRKRMLASAGELQKGNELALPSKYVNFLYLASHYEKLKGSPEDNEQKQLFVEQHKHYLDEIIEQISEFSKRVILADANLDKVLSAYNKHRDKPIREQAENIIHLFTLTNLGAPAAFKYFDTTIDRKRYTSTKEVLDATLIHQSITGLYETRIDLSQLGGDGGGGGEAAAKPAPGGVPWILKKPLELTIKLDLEEQQGTLLNNSILSKKGKEELKQLFEKYSALWQSWENQVGHRRIRPHKIATGTVKPTPQKQYHINPKAKPDIQIVINDLLKQGVLIQKESTMNTPVYPVPKPNGRWRMVLDYRAVNKVTPLIAVQNQHSYGILGSLFKGRYKTTIDLSNGFWAHPIVPEDYWITAFTWQGKQYCWTVLPQGFLNSPGLFTGDVVDLLQGIPNVEVYVDDVYISHDSEKEHLEYLDILFNRLKEAGYIISLKKSNIANSIVDFLGFQITNEGRGLTDTFKEKLENITAPTTLKQLQSILGLLNFARNFIPDFTELIAPLYALIPKSTKNYVPWQIEHSTTLETLITKLNGAEYLQGRKGDKTLIMKVNASYTTGYIRYYNEGEKKPISYVSIVFSKTELKFTELEKLLTTVHKGLLKALDLSMGQNIHVYSPIVSMQNIQKTPQTAKKALASRWLSWLSYLEDPRIRFFYDPQMPALKDLPAVDTGKDNKKHPSNFQHIFYTDGSAITSPTKEGHLNAGMGIVYFINKDGNLQKQQEWSISLGNHTAQFAEIAAFEFALKKCLPLGGNILVVTDSNYVAKAYNEELDVWASNGFVNNRKKPLKHISKWKSVADLKRLRPDVVVTHEPGHQKLDSSPHAYGNNLADQLATQASFKVHAGKRTADGSEFEKRTADGSEFESPKKKAKVE

SEQ ID NO: 7449 - protein, 2087 aa, synthetic construct
MPAAKRVKLDGGDKKYSIGLDIGTNSVGWAVITDEYKVPSKKFKVLGNTDRHSIKKNLIGALLFDSGETAEATRLKRTARRRYTRRKNRICYLQEIFSNEMAKVDDSFFHRLEESFLVEEDKKHERHPIFGNIVDEVAYHEKYPTIYHLRKKLVDSTDKADLRLIYLALAHMIKFRGHFLIEGDLNPDNSDVDKLFIQLVQTYNQLFEENPINASGVDAKAILSARLSKSRRLENLIAQLPGEKKNGLFGNLIALSLGLTPNFKSNFDLAEDAKLQLSKDTYDDDLDNLLAQIGDQYADLFLAAKNLSDAILLSDILRVNTEITKAPLSASMIKRYDEHHQDLTLLKALVRQQLPEKYKEIFFDQSKNGYAGYIDGGASQEEFYKFIKPILEKMDGTEELLVKLNREDLLRKQRTFDNGSIPHQIHLGELHAILRRQEDFYPFLKDNREKIEKILTFRIPYYVGPLARGNSRFAWMTRKSEETITPWNFEEVVDKGASAQSFIERMTNFDKNLPNEKVLPKHSLLYEYFTVYNELTKVKYVTEGMRKPAFLSGEQKKAIVDLLFKTNRKVTVKQLKEDYFKKIECFDSVEISGVEDRFNASLGTYHDLLKIIKDKDFLDNEENEDILEDIVLTLTLFEDREMIEERLKTYAHLFDDKVMKQLKRRRYTGWGRLSRKLINGIRDKQSGKTILDFLKSDGFANRNFMQLIHDDSLTFKEDIQKAQVSGQGDSLHEHIANLAGSPAIKKGILQTVKVVDELVKVMGRHKPENIVIEMARENQTTQKGQKNSRERMKRIEEGIKELGSQILKEHPVENTQLQNEKLYLYYLQNGRDMYVDQELDINRLSDYDVDHIVPQSFLKDDSIDNKVLTRSDKARGKSDNVPSEEVVKKMKNYWRQLLNAKLITQRKFDNLTKAERGGLSELDKAGFIKRQLVETRQITKHVAQILDSRMNTKYDENDKLIREVKVITLKSKLVSDFRKDFQFYKVREINNYHHAHDAYLNAVVGTALIKKYPKLESEFVYGDYKVYDVRKMIAKSEQEIGKATAKYFFYSNIMNFFKTEITLANGEIRKRPLIETNGETGEIVWDKGRDFATVRKVLSMPQVNIVKKTEVQTGGFSKESILPKRNSDKLIARKKDWDPKKYGGFDSPTVAYSVLVVAKVEKGKSKKLKSVKELLGITIMERSSFEKNPIDFLEAKGYKEVKKDLIIKLPKYSLFELENGRKRMLASAGELQKGNELALPSKYVNFLYLASHYEKLKGSPEDNEQKQLFVEQHKHYLDEIIEQISEFSKRVILADANLDKVLSAYNKHRDKPIREQAENIIHLFTLTNLGAPAAFKYFDTTIDRKRYTSTKEVLDATLIHQSITGLYETRIDLSQLGGDGGGGGEAAAKPAPGGVPWILKKPLELTIKLDLEEQQGTLLNNSILSKKGKEELKQLFEKYSALWQSWENQVGHRRIRPHKIATGTVKPTPQKQYHINPKAKPDIQIVINDLLKQGVLIQKESTMNTPVYPVPKPNGRWRMVLDYRAVNKVTPLIAVQNQHSYGILGSLFKGRYKTTIDLSNGFWAHPIVPEDYWITAFTWQGKQYCWTVLPQGFLNSPGLFNGDVVDLLQGIPNVEVYVDDVYISHDSEKEHLEYLDILFNRLKEAGYIISLKKSNIANSIVDFLGFQITNEGRGLTDTFKEKLENITAPTTLKQLQSILGLLNFARNFIPDFTELIAPLYALIPKSPKNYVPWQIEHSTTLETLITKLNGAEYLQGRKGDKTLIMKVNASYTTGYIRYYNEGEKKPISYVSIVFSKTELKFTELEKLLTTVHKGLLKALDLSMGQNIHVYSPIVSMQNIQKTPQTAKKALASRWLSWLSYLEDPRIRFFYDPQMPALKDLPAVDTGKDNKKHPSNFQHIFYTDGSAITSPTKEGHLNAGMGIVYFINKDGNLQKQQEWSISLGNHTAQFAEIAAFEFALKKCLPLGGNILVVTDSNYVAKAYNEELDVWASNGFVNNRKKPLKHISKWKSVADLKRLRPDVVVTHEPGHQKLDSSPHAYGNNLADQLATQASFKVHAGKRTADGSEFEKRTADGSEFESPKKKAKVE

SEQ ID NO: 7450 - protein, 2176 aa, synthetic construct
MPAAKRVKLDGGDKKYSIGLDIGTNSVGWAVITDEYKVPSKKFKVLGNTDRHSIKKNLIGALLFDSGETAEATRLKRTARRRYTRRKNRICYLQEIFSNEMAKVDDSFFHRLEESFLVEEDKKHERHPIFGNIVDEVAYHEKYPTIYHLRKKLVDSTDKADLRLIYLALAHMIKFRGHFLIEGDLNPDNSDVDKLFIQLVQTYNQLFEENPINASGVDAKAILSARLSKSRRLENLIAQLPGEKKNGLFGNLIALSLGLTPNFKSNFDLAEDAKLQLSKDTYDDDLDNLLAQIGDQYADLFLAAKNLSDAILLSDILRVNTEITKAPLSASMIKRYDEHHQDLTLLKALVRQQLPEKYKEIFFDQSKNGYAGYIDGGASQEEFYKFIKPILEKMDGTEELLVKLNREDLLRKQRTFDNGSIPHQIHLGELHAILRRQEDFYPFLKDNREKIEKILTFRIPYYVGPLARGNSRFAWMTRKSEETITPWNFEEVVDKGASAQSFIERMTNFDKNLPNEKVLPKHSLLYEYFTVYNELTKVKYVTEGMRKPAFLSGEQKKAIVDLLFKTNRKVTVKQLKEDYFKKIECFDSVEISGVEDRFNASLGTYHDLLKIIKDKDFLDNEENEDILEDIVLTLTLFEDREMIEERLKTYAHLFDDKVMKQLKRRRYTGWGRLSRKLINGIRDKQSGKTILDFLKSDGFANRNFMQLIHDDSLTFKEDIQKAQVSGQGDSLHEHIANLAGSPAIKKGILQTVKVVDELVKVMGRHKPENIVIEMARENQTTQKGQKNSRERMKRIEEGIKELGSQILKEHPVENTQLQNEKLYLYYLQNGRDMYVDQELDINRLSDYDVDHIVPQSFLKDDSIDNKVLTRSDKARGKSDNVPSEEVVKKMKNYWRQLLNAKLITQRKFDNLTKAERGGLSELDKAGFIKRQLVETRQITKHVAQILDSRMNTKYDENDKLIREVKVITLKSKLVSDFRKDFQFYKVREINNYHHAHDAYLNAVVGTALIKKYPKLESEFVYGDYKVYDVRKMIAKSEQEIGKATAKYFFYSNIMNFFKTEITLANGEIRKRPLIETNGETGEIVWDKGRDFATVRKVLSMPQVNIVKKTEVQTGGFSKESILPKRNSDKLIARKKDWDPKKYGGFDSPTVAYSVLVVAKVEKGKSKKLKSVKELLGITIMERSSFEKNPIDFLEAKGYKEVKKDLIIKLPKYSLFELENGRKRMLASAGELQKGNELALPSKYVNFLYLASHYEKLKGSPEDNEQKQLFVEQHKHYLDEIIEQISEFSKRVILADANLDKVLSAYNKHRDKPIREQAENIIHLFTLTNLGAPAAFKYFDTTIDRKRYTSTKEVLDATLIHQSITGLYETRIDLSQLGGDGGGGGEAAAKPAPGGMNPLQLLQPLPAEIKGTKLLAHWNSGATITCIPESFLEDEQPIKKTLIKTIHGEKQQNVYYVTFKVKGRKVEAEVIASPYEYILLSPTDVPWLTQQPLQLTILVPLQEYQEKILSKTALPEDQKQQLKTLFVKYDNLWQHWENQVGHRKIRPHNIATGDYPPRPQKQYPINPKAKPSIQIVIDDLLKQGVLTPQNSTMNTPVYPVPKPDGRWRMVLDYREVNKTIPLTAAQNQHSAGILATIVRQKYKTTLDLANGFWAHPITPESYWLTAFTWQGKQYCWTRLPQGFLNSPALFNADVVDLLKEIPNVQVYVDDIYLSHDDPKEHVQQLEKVFQILLQAGYVVSLKKSEIGQKTVEFLGFNITKEGRGLTDTFKTKLLNITPPKDLKQLQSILGKLNFARNFIPNFAELVQPLYNLIAPAKGKYIEWSEENTKQLNMVIEALNTASNLEERLPEQRLVIKVNTSPSAGYVRYYNETGKKPIMYLNYVFSKAELKFSMLEKLLTTMHKALIKAMDLAMGQEILVYSPIVSMTKIQKTPLPERKALPIRWITWMTYLEDPRIQFHYDKTLPELKHIPDVYTSSQSPVKHPSQYEGVFYTDGSAIKSPDPTKSNNAGMGIVHATYKPEYQVLNQWSIPLGNHTAQMAEIAAVEFACKKALKIPGPVLVITDSFYVAESANKELPYWKSNGFVNNKKKPLKHISKWKSIAECLSMKPDITIQHEKGISLQIPVFILKGNALADKLATQGSYVVNAGKRTADGSEFEKRTADGSEFESPKKKAKVE

SEQ ID NO: 7451 - protein, 2127 aa, synthetic construct
MPAAKRVKLDGGDKKYSIGLDIGTNSVGWAVITDEYKVPSKKFKVLGNTDRHSIKKNLIGALLFDSGETAEATRLKRTARRRYTRRKNRICYLQEIFSNEMAKVDDSFFHRLEESFLVEEDKKHERHPIFGNIVDEVAYHEKYPTIYHLRKKLVDSTDKADLRLIYLALAHMIKFRGHFLIEGDLNPDNSDVDKLFIQLVQTYNQLFEENPINASGVDAKAILSARLSKSRRLENLIAQLPGEKKNGLFGNLIALSLGLTPNFKSNFDLAEDAKLQLSKDTYDDDLDNLLAQIGDQYADLFLAAKNLSDAILLSDILRVNTEITKAPLSASMIKRYDEHHQDLTLLKALVRQQLPEKYKEIFFDQSKNGYAGYIDGGASQEEFYKFIKPILEKMDGTEELLVKLNREDLLRKQRTFDNGSIPHQIHLGELHAILRRQEDFYPFLKDNREKIEKILTFRIPYYVGPLARGNSRFAWMTRKSEETITPWNFEEVVDKGASAQSFIERMTNFDKNLPNEKVLPKHSLLYEYFTVYNELTKVKYVTEGMRKPAFLSGEQKKAIVDLLFKTNRKVTVKQLKEDYFKKIECFDSVEISGVEDRFNASLGTYHDLLKIIKDKDFLDNEENEDILEDIVLTLTLFEDREMIEERLKTYAHLFDDKVMKQLKRRRYTGWGRLSRKLINGIRDKQSGKTILDFLKSDGFANRNFMQLIHDDSLTFKEDIQKAQVSGQGDSLHEHIANLAGSPAIKKGILQTVKVVDELVKVMGRHKPENIVIEMARENQTTQKGQKNSRERMKRIEEGIKELGSQILKEHPVENTQLQNEKLYLYYLQNGRDMYVDQELDINRLSDYDVDHIVPQSFLKDDSIDNKVLTRSDKARGKSDNVPSEEVVKKMKNYWRQLLNAKLITQRKFDNLTKAERGGLSELDKAGFIKRQLVETRQITKHVAQILDSRMNTKYDENDKLIREVKVITLKSKLVSDFRKDFQFYKVREINNYHHAHDAYLNAVVGTALIKKYPKLESEFVYGDYKVYDVRKMIAKSEQEIGKATAKYFFYSNIMNFFKTEITLANGEIRKRPLIETNGETGEIVWDKGRDFATVRKVLSMPQVNIVKKTEVQTGGFSKESILPKRNSDKLIARKKDWDPKKYGGFDSPTVAYSVLVVAKVEKGKSKKLKSVKELLGITIMERSSFEKNPIDFLEAKGYKEVKKDLIIKLPKYSLFELENGRKRMLASAGELQKGNELALPSKYVNFLYLASHYEKLKGSPEDNEQKQLFVEQHKHYLDEIIEQISEFSKRVILADANLDKVLSAYNKHRDKPIREQAENIIHLFTLTNLGAPAAFKYFDTTIDRKRYTSTKEVLDATLIHQSITGLYETRIDLSQLGGDGGGGGEAAAKPAPGGLLGRDLLTKLKAQIQFSTEGPQVTWEDRPAMCLVLNLEEEYRLHEKPVPPSIDPSWLQLFPMVWAEKAGMGLANQVPPVVVELKSDASPVAVRQYPMSKEAREGIRPHIQRFLDLGILVPCQSPWNTPLLPVKKPGTNDYRPVQDLREVNKRVQDIHPTVPNPYNLLSSLPPSHTWYSVLDLKDAFFCLKLHPNSQPLFAFEWRDPEKGNTGQLTWTRLPQGFKNSPTLFNEALHRDLASFRALNPQVVMLQYVDDLLVAAPTYRDCKEGTRRLLQELSKLGYRVSAKKAQLCREEVTYLGYLLKGGKRWLTPARKATVMKIPTPTTPRQVREFLGTAGFCRLWIPGFASLAAPLYPLTRPKVPFTWTEAHQEAFGRIKEALLSAPALALPDLTKPFALYVDEKEGVARGVLTQTLGPWRRPVAYLSKKLDPVASGWPTCLKAIAAVALLLKDADKLTLGQNVLVIAPHNLESIVRQPPDRWMTNARMTHYQSLLLNERVSFAPPAILNPATLLPVESDDTPIHICSEILAEETGTRPDLRDQPLPGVPAWYTDGSSFIMDGRRQAGAAIVDNKRTVWASNLPEGTSAQKAELIALTQALRLAEGKSINIYTDSRYAFATAHVHGAIYKQRGWLTSAGKDIKNKEEILALLEAIHLPKRVAIIHCPGHQRGTDPVATGNRKADEAAKQAAQSTRILTETTKNAGKRTADGSEFEKRTADGSEFESPKKKAKVE

SEQ ID NO: 7452 - protein, 2096 aa, synthetic construct
MPAAKRVKLDGGDKKYSIGLDIGTNSVGWAVITDEYKVPSKKFKVLGNTDRHSIKKNLIGALLFDSGETAEATRLKRTARRRYTRRKNRICYLQEIFSNEMAKVDDSFFHRLEESFLVEEDKKHERHPIFGNIVDEVAYHEKYPTIYHLRKKLVDSTDKADLRLIYLALAHMIKFRGHFLIEGDLNPDNSDVDKLFIQLVQTYNQLFEENPINASGVDAKAILSARLSKSRRLENLIAQLPGEKKNGLFGNLIALSLGLTPNFKSNFDLAEDAKLQLSKDTYDDDLDNLLAQIGDQYADLFLAAKNLSDAILLSDILRVNTEITKAPLSASMIKRYDEHHQDLTLLKALVRQQLPEKYKEIFFDQSKNGYAGYIDGGASQEEFYKFIKPILEKMDGTEELLVKLNREDLLRKQRTFDNGSIPHQIHLGELHAILRRQEDFYPFLKDNREKIEKILTFRIPYYVGPLARGNSRFAWMTRKSEETITPWNFEEVVDKGASAQSFIERMTNFDKNLPNEKVLPKHSLLYEYFTVYNELTKVKYVTEGMRKPAFLSGEQKKAIVDLLFKTNRKVTVKQLKEDYFKKIECFDSVEISGVEDRFNASLGTYHDLLKIIKDKDFLDNEENEDILEDIVLTLTLFEDREMIEERLKTYAHLFDDKVMKQLKRRRYTGWGRLSRKLINGIRDKQSGKTILDFLKSDGFANRNFMQLIHDDSLTFKEDIQKAQVSGQGDSLHEHIANLAGSPAIKKGILQTVKVVDELVKVMGRHKPENIVIEMARENQTTQKGQKNSRERMKRIEEGIKELGSQILKEHPVENTQLQNEKLYLYYLQNGRDMYVDQELDINRLSDYDVDHIVPQSFLKDDSIDNKVLTRSDKARGKSDNVPSEEVVKKMKNYWRQLLNAKLITQRKFDNLTKAERGGLSELDKAGFIKRQLVETRQITKHVAQILDSRMNTKYDENDKLIREVKVITLKSKLVSDFRKDFQFYKVREINNYHHAHDAYLNAVVGTALIKKYPKLESEFVYGDYKVYDVRKMIAKSEQEIGKATAKYFFYSNIMNFFKTEITLANGEIRKRPLIETNGETGEIVWDKGRDFATVRKVLSMPQVNIVKKTEVQTGGFSKESILPKRNSDKLIARKKDWDPKKYGGFDSPTVAYSVLVVAKVEKGKSKKLKSVKELLGITIMERSSFEKNPIDFLEAKGYKEVKKDLIIKLPKYSLFELENGRKRMLASAGELQKGNELALPSKYVNFLYLASHYEKLKGSPEDNEQKQLFVEQHKHYLDEIIEQISEFSKRVILADANLDKVLSAYNKHRDKPIREQAENIIHLFTLTNLGAPAAFKYFDTTIDRKRYTSTKEVLDATLIHQSITGLYETRIDLSQLGGDGGGGGEAAAKPAPGGTLGIEDEYRLHETSTEPDVSLGSTWLSDFPQAWAETGGMGLAVRQAPLIIPLKATSTPVSIQQYPMSHEARLGIKPHIQRLLDQGILVPCQSPWNTPLLPVKKPGTNDYRPVQDLREVNKRVEDIHPTVPNPYNLLSGLPPSHQWYTVLDLKDAFFCLRLHPTSQPLFAFEWRDPGMGISGQLTWTRLPQGFKNSPTLFDEALHRDLADFRIQHPDLILLQYVDDILLAATSELDCQQGTRALLQTLGDLGYRASAKKAQICQKQVKYLGYLLREGQRWLTEARKETVMGQPVPKTPRQLREFLGTAGFCRLWIPGFAEMAAPLYPLTKTGTLFSWGPDQQKAYQEIKQALLTAPALGLPDLTKPFELFVDEKQGYAKGVLTQKLGPWRRPVAYLSKKLDPVAAGWPPCLRMVAAIAVLTKDAGKLTMGQPLVILAPHAVEALVKQPPDRWLSNARMTHYQAMLLDTDRVQFGPVVALNPATLLPLPEEGAPHDCLEILAETHGTRPDLTDQPIPDADHTWYTDGSSFLQEGQRKAGAAVTTETEVIWAGALPAGTSAQRAELIALTQALKMAEGKRLNVYTDSRYAFATAHIHGEIYRRRGLLTSEGREIKNKSEILALLKALFLPKRLSIIHCLGHQKGDSAEARGNRLADQAAREAAIKTPPDTSTLLAGKRTADGSEFEKRTADGSEFESPKKKAKVE

SEQ ID NO: 7453 - protein, 2096 aa, synthetic construct
MPAAKRVKLDGGDKKYSIGLDIGTNSVGWAVITDEYKVPSKKFKVLGNTDRHSIKKNLIGALLFDSGETAEATRLKRTARRRYTRRKNRICYLQEIFSNEMAKVDDSFFHRLEESFLVEEDKKHERHPIFGNIVDEVAYHEKYPTIYHLRKKLVDSTDKADLRLIYLALAHMIKFRGHFLIEGDLNPDNSDVDKLFIQLVQTYNQLFEENPINASGVDAKAILSARLSKSRRLENLIAQLPGEKKNGLFGNLIALSLGLTPNFKSNFDLAEDAKLQLSKDTYDDDLDNLLAQIGDQYADLFLAAKNLSDAILLSDILRVNTEITKAPLSASMIKRYDEHHQDLTLLKALVRQQLPEKYKEIFFDQSKNGYAGYIDGGASQEEFYKFIKPILEKMDGTEELLVKLNREDLLRKQRTFDNGSIPHQIHLGELHAILRRQEDFYPFLKDNREKIEKILTFRIPYYVGPLARGNSRFAWMTRKSEETITPWNFEEVVDKGASAQSFIERMTNFDKNLPNEKVLPKHSLLYEYFTVYNELTKVKYVTEGMRKPAFLSGEQKKAIVDLLFKTNRKVTVKQLKEDYFKKIECFDSVEISGVEDRFNASLGTYHDLLKIIKDKDFLDNEENEDILEDIVLTLTLFEDREMIEERLKTYAHLFDDKVMKQLKRRRYTGWGRLSRKLINGIRDKQSGKTILDFLKSDGFANRNFMQLIHDDSLTFKEDIQKAQVSGQGDSLHEHIANLAGSPAIKKGILQTVKVVDELVKVMGRHKPENIVIEMARENQTTQKGQKNSRERMKRIEEGIKELGSQILKEHPVENTQLQNEKLYLYYLQNGRDMYVDQELDINRLSDYDVDHIVPQSFLKDDSIDNKVLTRSDKARGKSDNVPSEEVVKKMKNYWRQLLNAKLITQRKFDNLTKAERGGLSELDKAGFIKRQLVETRQITKHVAQILDSRMNTKYDENDKLIREVKVITLKSKLVSDFRKDFQFYKVREINNYHHAHDAYLNAVVGTALIKKYPKLESEFVYGDYKVYDVRKMIAKSEQEIGKATAKYFFYSNIMNFFKTEITLANGEIRKRPLIETNGETGEIVWDKGRDFATVRKVLSMPQVNIVKKTEVQTGGFSKESILPKRNSDKLIARKKDWDPKKYGGFDSPTVAYSVLVVAKVEKGKSKKLKSVKELLGITIMERSSFEKNPIDFLEAKGYKEVKKDLIIKLPKYSLFELENGRKRMLASAGELQKGNELALPSKYVNFLYLASHYEKLKGSPEDNEQKQLFVEQHKHYLDEIIEQISEFSKRVILADANLDKVLSAYNKHRDKPIREQAENIIHLFTLTNLGAPAAFKYFDTTIDRKRYTSTKEVLDATLIHQSITGLYETRIDLSQLGGDGGGGGEAAAKPAPGGTLGIEDEYRLHETSTEPDVSLGSTWLSDFPQAWAETGGMGLAVRQAPLIIPLKATSTPVSIQQYPMSHEARLGIKPHIQRLLDQGILVPCQSPWNTPLLPVKKPGTNDYRPVQDLREVNKRVEDIHPTVPNPYNLLSGLPPSHQWYTVLDLKDAFFCLRLHPTSQPLFAFEWRDPGMGISGQLTWTRLPQGFKNSPTLFNEALHRDLADFRIQHPDLILLQYVDDILLAATSELDCQQGTRALLQTLGDLGYRASAKKAQICQKQVKYLGYLLREGQRWLTEARKETVMGQPVPKTPRQLREFLGTAGFCRLWIPGFAEMAAPLYPLTKPGTLFSWGPDQQKAYQEIKQALLTAPALGLPDLTKPFELFVDEKQGYAKGVLTQKLGPWRRPVAYLSKKLDPVAAGWPPCLRMVAAIAVLTKDAGKLTMGQPLVILAPHAVEALVKQPPDRWLSNARMTHYQAMLLDTDRVQFGPVVALNPATLLPLPEEGAPHDCLEILAETHGTRPDLTDQPIPDADHTWYTDGSSFLQEGQRKAGAAVTTETEVIWAGALPAGTSAQRAELIALTQALKMAEGKRLNVYTDSRYAFATAHIHGEIYRRRGWLTSEGREIKNKSEILALLKALFLPKRLSIIHCLGHQKGDSAEARGNRLADQAAREAAIKTPPDTSTLLAGKRTADGSEFEKRTADGSEFESPKKKAKVE

SEQ ID NO: 7454 - protein, 2096 aa, synthetic construct
MPAAKRVKLDGGDKKYSIGLDIGTNSVGWAVITDEYKVPSKKFKVLGNTDRHSIKKNLIGALLFDSGETAEATRLKRTARRRYTRRKNRICYLQEIFSNEMAKVDDSFFHRLEESFLVEEDKKHERHPIFGNIVDEVAYHEKYPTIYHLRKKLVDSTDKADLRLIYLALAHMIKFRGHFLIEGDLNPDNSDVDKLFIQLVQTYNQLFEENPINASGVDAKAILSARLSKSRRLENLIAQLPGEKKNGLFGNLIALSLGLTPNFKSNFDLAEDAKLQLSKDTYDDDLDNLLAQIGDQYADLFLAAKNLSDAILLSDILRVNTEITKAPLSASMIKRYDEHHQDLTLLKALVRQQLPEKYKEIFFDQSKNGYAGYIDGGASQEEFYKFIKPILEKMDGTEELLVKLNREDLLRKQRTFDNGSIPHQIHLGELHAILRRQEDFYPFLKDNREKIEKILTFRIPYYVGPLARGNSRFAWMTRKSEETITPWNFEEVVDKGASAQSFIERMTNFDKNLPNEKVLPKHSLLYEYFTVYNELTKVKYVTEGMRKPAFLSGEQKKAIVDLLFKTNRKVTVKQLKEDYFKKIECFDSVEISGVEDRFNASLGTYHDLLKIIKDKDFLDNEENEDILEDIVLTLTLFEDREMIEERLKTYAHLFDDKVMKQLKRRRYTGWGRLSRKLINGIRDKQSGKTILDFLKSDGFANRNFMQLIHDDSLTFKEDIQKAQVSGQGDSLHEHIANLAGSPAIKKGILQTVKVVDELVKVMGRHKPENIVIEMARENQTTQKGQKNSRERMKRIEEGIKELGSQILKEHPVENTQLQNEKLYLYYLQNGRDMYVDQELDINRLSDYDVDHIVPQSFLKDDSIDNKVLTRSDKARGKSDNVPSEEVVKKMKNYWRQLLNAKLITQRKFDNLTKAERGGLSELDKAGFIKRQLVETRQITKHVAQILDSRMNTKYDENDKLIREVKVITLKSKLVSDFRKDFQFYKVREINNYHHAHDAYLNAVVGTALIKKYPKLESEFVYGDYKVYDVRKMIAKSEQEIGKATAKYFFYSNIMNFFKTEITLANGEIRKRPLIETNGETGEIVWDKGRDFATVRKVLSMPQVNIVKKTEVQTGGFSKESILPKRNSDKLIARKKDWDPKKYGGFDSPTVAYSVLVVAKVEKGKSKKLKSVKELLGITIMERSSFEKNPIDFLEAKGYKEVKKDLIIKLPKYSLFELENGRKRMLASAGELQKGNELALPSKYVNFLYLASHYEKLKGSPEDNEQKQLFVEQHKHYLDEIIEQISEFSKRVILADANLDKVLSAYNKHRDKPIREQAENIIHLFTLTNLGAPAAFKYFDTTIDRKRYTSTKEVLDATLIHQSITGLYETRIDLSQLGGDGGGGGEAAAKPAPGGTLNIEDEYRLHETSKGPDVPLGSTWLSDFPQAWAETGGMGLAVRQAPLIIPLKATSTPVSIKQYPMSQEARLGIKPHIQRLLDQGILVPCQSPWNTPLLPVKKPGTNDYRPVQDLREVNKRVEDIHPTVPNPYNLLSGLPPSHQWYTVLDLKDAFFCLRLHPTSQSLFAFEWRDPEMGISGQLTWTRLPQGFKNSPTLFNEALHRDLADFRIQHPDLILLQYVDDLLLAATSELDCQQGTRALLQTLGDLGYRASAKKAQICQKQVKYLGYLLKEGQRWLTEARKETVMGQPTPKTPRQLREFLGTAGFCRLWIPGFAEMAAPLYPLTKPGTLFEWGPDQQKAYQEIKQALLTAPALGLPDLTKPFELFVDEKQGYAKGVLTQKLGPWRRPVAYLSKKLDPVAAGWPPCLRMVAAIAVLTKDAGKLTMGQPLVILAPHAVEALVKQPPDRWLSNARMTHYQALLLDTDRVQFGPIVALNPATLLPLPEEGLQHDCLDILAEAHGTRPDLTDQPLPDADHTWYTDGSSFLQEGQRKAGAAVTTETEVVWAKALPAGTSAQRAELIALTQALKMAEGKKLNVYTDSRYAFATAHIHGEIYRRRGWLTSEGKEIKNKDEILALLKALFLPKRLSIIHCPGHQKGNRAEARGNRMADQAAREVATRETPETSTLLAGKRTADGSEFEKRTADGSEFESPKKKAKVE

SEQ ID NO: 7455 - protein, 2096 aa, synthetic construct
MPAAKRVKLDGGDKKYSIGLDIGTNSVGWAVITDEYKVPSKKFKVLGNTDRHSIKKNLIGALLFDSGETAEATRLKRTARRRYTRRKNRICYLQEIFSNEMAKVDDSFFHRLEESFLVEEDKKHERHPIFGNIVDEVAYHEKYPTIYHLRKKLVDSTDKADLRLIYLALAHMIKFRGHFLIEGDLNPDNSDVDKLFIQLVQTYNQLFEENPINASGVDAKAILSARLSKSRRLENLIAQLPGEKKNGLFGNLIALSLGLTPNFKSNFDLAEDAKLQLSKDTYDDDLDNLLAQIGDQYADLFLAAKNLSDAILLSDILRVNTEITKAPLSASMIKRYDEHHQDLTLLKALVRQQLPEKYKEIFFDQSKNGYAGYIDGGASQEEFYKFIKPILEKMDGTEELLVKLNREDLLRKQRTFDNGSIPHQIHLGELHAILRRQEDFYPFLKDNREKIEKILTFRIPYYVGPLARGNSRFAWMTRKSEETITPWNFEEVVDKGASAQSFIERMTNFDKNLPNEKVLPKHSLLYEYFTVYNELTKVKYVTEGMRKPAFLSGEQKKAIVDLLFKTNRKVTVKQLKEDYFKKIECFDSVEISGVEDRFNASLGTYHDLLKIIKDKDFLDNEENEDILEDIVLTLTLFEDREMIEERLKTYAHLFDDKVMKQLKRRRYTGWGRLSRKLINGIRDKQSGKTILDFLKSDGFANRNFMQLIHDDSLTFKEDIQKAQVSGQGDSLHEHIANLAGSPAIKKGILQTVKVVDELVKVMGRHKPENIVIEMARENQTTQKGQKNSRERMKRIEEGIKELGSQILKEHPVENTQLQNEKLYLYYLQNGRDMYVDQELDINRLSDYDVDHIVPQSFLKDDSIDNKVLTRSDKARGKSDNVPSEEVVKKMKNYWRQLLNAKLITQRKFDNLTKAERGGLSELDKAGFIKRQLVETRQITKHVAQILDSRMNTKYDENDKLIREVKVITLKSKLVSDFRKDFQFYKVREINNYHHAHDAYLNAVVGTALIKKYPKLESEFVYGDYKVYDVRKMIAKSEQEIGKATAKYFFYSNIMNFFKTEITLANGEIRKRPLIETNGETGEIVWDKGRDFATVRKVLSMPQVNIVKKTEVQTGGFSKESILPKRNSDKLIARKKDWDPKKYGGFDSPTVAYSVLVVAKVEKGKSKKLKSVKELLGITIMERSSFEKNPIDFLEAKGYKEVKKDLIIKLPKYSLFELENGRKRMLASAGELQKGNELALPSKYVNFLYLASHYEKLKGSPEDNEQKQLFVEQHKHYLDEIIEQISEFSKRVILADANLDKVLSAYNKHRDKPIREQAENIIHLFTLTNLGAPAAFKYFDTTIDRKRYTSTKEVLDATLIHQSITGLYETRIDLSQLGGDGGGGGEAAAKPAPGGTLNIEDEHRLHETSKEPDVSLGSTWLSDFPQAWAETGGMGLAVRQAPLIIPLKATSTPVSIKQYPMSQEARLGIKPHIQRLLDQGILVPCQSPWNTPLLPVKKPGTNDYRPVQDLREVNKRVEDIHPTVPNPYNLLSGLPPSHQWYTVLDLKDAFFCLRLHPTSQPLFAFEWRDPEMGISGQLTWTRLPQGFKNSPTLFDEALHRDLADFRIQHPDLILLQYVDDLLLAATSELDCQQGTRALLQTLGNLGYRASAKKAQICQKQVKYLGYLLKEGQRWLTEARKETVMGQPTPKTPRQLREFLGTAGFCRLWIPGFAEMAAPLYPLTKTGTLFNWGPDQQKAYQEIKQALLTAPALGLPDLTKPFELFVDEKQGYAKGVLTQKLGPWRRPVAYLSKKLDPVAAGWPPCLRMVAAIAVLTKDAGKLTMGQPLVILAPHAVEALVKQPPDRWLSNARMTHYQALLLDTDRVQFGPVVALNPATLLPLPEEGLQHNCLDILAEAHGTRPDLTDQPLPDADHTWYTDGSSLLQEGQRKAGAAVTTETEVIWAKALPAGTSAQRAELIALTQALKMAEGKKLNVYTDSRYAFATAHIHGEIYRRRGLLTSEGKEIKNKDEILALLKALFLPKRLSIIHCPGHQKGHSAEARGNRMADQAARKAAITETPDTSTLLAGKRTADGSEFEKRTADGSEFESPKKKAKVE

SEQ ID NO: 7456 - protein, 2087 aa, synthetic construct
MPAAKRVKLDGGDKKYSIGLDIGTNSVGWAVITDEYKVPSKKFKVLGNTDRHSIKKNLIGALLFDSGETAEATRLKRTARRRYTRRKNRICYLQEIFSNEMAKVDDSFFHRLEESFLVEEDKKHERHPIFGNIVDEVAYHEKYPTIYHLRKKLVDSTDKADLRLIYLALAHMIKFRGHFLIEGDLNPDNSDVDKLFIQLVQTYNQLFEENPINASGVDAKAILSARLSKSRRLENLIAQLPGEKKNGLFGNLIALSLGLTPNFKSNFDLAEDAKLQLSKDTYDDDLDNLLAQIGDQYADLFLAAKNLSDAILLSDILRVNTEITKAPLSASMIKRYDEHHQDLTLLKALVRQQLPEKYKEIFFDQSKNGYAGYIDGGASQEEFYKFIKPILEKMDGTEELLVKLNREDLLRKQRTFDNGSIPHQIHLGELHAILRRQEDFYPFLKDNREKIEKILTFRIPYYVGPLARGNSRFAWMTRKSEETITPWNFEEVVDKGASAQSFIERMTNFDKNLPNEKVLPKHSLLYEYFTVYNELTKVKYVTEGMRKPAFLSGEQKKAIVDLLFKTNRKVTVKQLKEDYFKKIECFDSVEISGVEDRFNASLGTYHDLLKIIKDKDFLDNEENEDILEDIVLTLTLFEDREMIEERLKTYAHLFDDKVMKQLKRRRYTGWGRLSRKLINGIRDKQSGKTILDFLKSDGFANRNFMQLIHDDSLTFKEDIQKAQVSGQGDSLHEHIANLAGSPAIKKGILQTVKVVDELVKVMGRHKPENIVIEMARENQTTQKGQKNSRERMKRIEEGIKELGSQILKEHPVENTQLQNEKLYLYYLQNGRDMYVDQELDINRLSDYDVDHIVPQSFLKDDSIDNKVLTRSDKARGKSDNVPSEEVVKKMKNYWRQLLNAKLITQRKFDNLTKAERGGLSELDKAGFIKRQLVETRQITKHVAQILDSRMNTKYDENDKLIREVKVITLKSKLVSDFRKDFQFYKVREINNYHHAHDAYLNAVVGTALIKKYPKLESEFVYGDYKVYDVRKMIAKSEQEIGKATAKYFFYSNIMNFFKTEITLANGEIRKRPLIETNGETGEIVWDKGRDFATVRKVLSMPQVNIVKKTEVQTGGFSKESILPKRNSDKLIARKKDWDPKKYGGFDSPTVAYSVLVVAKVEKGKSKKLKSVKELLGITIMERSSFEKNPIDFLEAKGYKEVKKDLIIKLPKYSLFELENGRKRMLASAGELQKGNELALPSKYVNFLYLASHYEKLKGSPEDNEQKQLFVEQHKHYLDEIIEQISEFSKRVILADANLDKVLSAYNKHRDKPIREQAENIIHLFTLTNLGAPAAFKYFDTTIDRKRYTSTKEVLDATLIHQSITGLYETRIDLSQLGGDGGGGGEAAAKPAPGGVPWLMKKPLQLTVLVPLHEYQERLLQQTALPKEQKELLQKLFLKYDALWQHWENQVGHRRIKPHNIATGTLAPRPQKQYPINPKAKPSIQIVIDDLLKQGVLIQQNSTMNTPVYPVPKPDGKWRMVLDYREVNKTIPLIAAQNQHSAGILSSIYRGKYKTTLDLTNGFWAHPITPESYWLTAFTWQGKQYCWTRLPQGFLNSPALFNADVVDLLKEIPNVQAYVDDIYISHDDPQEHLEQLEKIFSILLNAGYVVSLKKSEIAQREVEFLGFNITKEGRGLTDTFKQKLLNITPPKDLKQLQSILGKLNFARNFIPNYSELVKPLYTIVAPANGKFISWTEDNSNQLQHIISVLNQADNLEERNPETRLIIKVNSSPSAGYIRYYNEGSKRPIMYVNYIFSKAEAKFTQTEKLLTTMHKGLIKAMDLAMGQEILVYSPIVSMTKIQRTPLPERKALPVRWITWMTYLEDPRIQFHYDKSLPELQQIPNVTEDVIAKTKHPSEFAMVFYTDGSAIKHPDVNKSHSAGMGIAQVQFIPEYKIVHQWSIPLGDHTAQLAEIAAVEFACKKALKISGPVLIVTDSFYVAESANKELPYWKSNGFLNNKKKPLRHVSKWKSIAECLQLKPDIIIMHEKGHQQPMTTLHTEGNNLADKLATQGSYVVHAGKRTADGSEFEKRTADGSEFESPKKKAKVE

SEQ ID NO: 7457 - protein, 2087 aa, synthetic construct
MPAAKRVKLDGGDKKYSIGLDIGTNSVGWAVITDEYKVPSKKFKVLGNTDRHSIKKNLIGALLFDSGETAEATRLKRTARRRYTRRKNRICYLQEIFSNEMAKVDDSFFHRLEESFLVEEDKKHERHPIFGNIVDEVAYHEKYPTIYHLRKKLVDSTDKADLRLIYLALAHMIKFRGHFLIEGDLNPDNSDVDKLFIQLVQTYNQLFEENPINASGVDAKAILSARLSKSRRLENLIAQLPGEKKNGLFGNLIALSLGLTPNFKSNFDLAEDAKLQLSKDTYDDDLDNLLAQIGDQYADLFLAAKNLSDAILLSDILRVNTEITKAPLSASMIKRYDEHHQDLTLLKALVRQQLPEKYKEIFFDQSKNGYAGYIDGGASQEEFYKFIKPILEKMDGTEELLVKLNREDLLRKQRTFDNGSIPHQIHLGELHAILRRQEDFYPFLKDNREKIEKILTFRIPYYVGPLARGNSRFAWMTRKSEETITPWNFEEVVDKGASAQSFIERMTNFDKNLPNEKVLPKHSLLYEYFTVYNELTKVKYVTEGMRKPAFLSGEQKKAIVDLLFKTNRKVTVKQLKEDYFKKIECFDSVEISGVEDRFNASLGTYHDLLKIIKDKDFLDNEENEDILEDIVLTLTLFEDREMIEERLKTYAHLFDDKVMKQLKRRRYTGWGRLSRKLINGIRDKQSGKTILDFLKSDGFANRNFMQLIHDDSLTFKEDIQKAQVSGQGDSLHEHIANLAGSPAIKKGILQTVKVVDELVKVMGRHKPENIVIEMARENQTTQKGQKNSRERMKRIEEGIKELGSQILKEHPVENTQLQNEKLYLYYLQNGRDMYVDQELDINRLSDYDVDHIVPQSFLKDDSIDNKVLTRSDKARGKSDNVPSEEVVKKMKNYWRQLLNAKLITQRKFDNLTKAERGGLSELDKAGFIKRQLVETRQITKHVAQILDSRMNTKYDENDKLIREVKVITLKSKLVSDFRKDFQFYKVREINNYHHAHDAYLNAVVGTALIKKYPKLESEFVYGDYKVYDVRKMIAKSEQEIGKATAKYFFYSNIMNFFKTEITLANGEIRKRPLIETNGETGEIVWDKGRDFATVRKVLSMPQVNIVKKTEVQTGGFSKESILPKRNSDKLIARKKDWDPKKYGGFDSPTVAYSVLVVAKVEKGKSKKLKSVKELLGITIMERSSFEKNPIDFLEAKGYKEVKKDLIIKLPKYSLFELENGRKRMLASAGELQKGNELALPSKYVNFLYLASHYEKLKGSPEDNEQKQLFVEQHKHYLDEIIEQISEFSKRVILADANLDKVLSAYNKHRDKPIREQAENIIHLFTLTNLGAPAAFKYFDTTIDRKRYTSTKEVLDATLIHQSITGLYETRIDLSQLGGDGGGGGEAAAKPAPGGIPWLMKKPLQLTTLVPLQEYEERLLKQTMLTGSYKEKLQSLFLKYDALWQHWENQVGHRRIKPHHIATGTVNPRPQKQYPINPKAKASIQTVINDLLKQGVLIQQNSIMNTPVYPVPKPDGKWRMVLDYREVNKTIPLIAAQNQHSAGILSSIFRGKYKTTLDLSNGFWAHSITPESYWLTAFTWLGQQYCWTRLPQGFLNSPALFNADVVDLLKEVPNVQVYVDDIYISHDDPREHLEQLEKVFSLLLNAGYVVSLKKSEIAQHEVEFLGFNITKEGRGLTETFKQKLLNITPPRDLKQLQSILGLLNFARNFIPNFSELVKPLYNIIATAPGKYITWTTDNSQQLQNIISMLNSAENLEERNPEVRLIMKVNTSPSAGYIRFYNEFAKRPIMYLNYVYTKAEVKFTNTEKLLTTIHKGLIKALDLGMGQEILVYSPIVSMTKIQKTPLPERKALPIRWITWMSYLEDPRIQFHYDKTLPELQQVPTVTDDIIAKIKHPSEFSMVFYTDGSAIKHPNVNKSHNAGMGIAQVQFKPEFTVINTWSIPLGDHTAQLAEVAAVEFACKKALKIDGPVLIVTDSFYVAESVNKELPYWQSNGFFNNKKKPLKHVSKWKSIADCIQLKPDIIIIHEKGHQPTASTFHTEGNNLADKLATQGSYVVNAGKRTADGSEFEKRTADGSEFESPKKKAKVE

SEQ ID NO: 7458 - protein, 2176 aa, synthetic construct
MPAAKRVKLDGGDKKYSIGLDIGTNSVGWAVITDEYKVPSKKFKVLGNTDRHSIKKNLIGALLFDSGETAEATRLKRTARRRYTRRKNRICYLQEIFSNEMAKVDDSFFHRLEESFLVEEDKKHERHPIFGNIVDEVAYHEKYPTIYHLRKKLVDSTDKADLRLIYLALAHMIKFRGHFLIEGDLNPDNSDVDKLFIQLVQTYNQLFEENPINASGVDAKAILSARLSKSRRLENLIAQLPGEKKNGLFGNLIALSLGLTPNFKSNFDLAEDAKLQLSKDTYDDDLDNLLAQIGDQYADLFLAAKNLSDAILLSDILRVNTEITKAPLSASMIKRYDEHHQDLTLLKALVRQQLPEKYKEIFFDQSKNGYAGYIDGGASQEEFYKFIKPILEKMDGTEELLVKLNREDLLRKQRTFDNGSIPHQIHLGELHAILRRQEDFYPFLKDNREKIEKILTFRIPYYVGPLARGNSRFAWMTRKSEETITPWNFEEVVDKGASAQSFIERMTNFDKNLPNEKVLPKHSLLYEYFTVYNELTKVKYVTEGMRKPAFLSGEQKKAIVDLLFKTNRKVTVKQLKEDYFKKIECFDSVEISGVEDRFNASLGTYHDLLKIIKDKDFLDNEENEDILEDIVLTLTLFEDREMIEERLKTYAHLFDDKVMKQLKRRRYTGWGRLSRKLINGIRDKQSGKTILDFLKSDGFANRNFMQLIHDDSLTFKEDIQKAQVSGQGDSLHEHIANLAGSPAIKKGILQTVKVVDELVKVMGRHKPENIVIEMARENQTTQKGQKNSRERMKRIEEGIKELGSQILKEHPVENTQLQNEKLYLYYLQNGRDMYVDQELDINRLSDYDVDHIVPQSFLKDDSIDNKVLTRSDKARGKSDNVPSEEVVKKMKNYWRQLLNAKLITQRKFDNLTKAERGGLSELDKAGFIKRQLVETRQITKHVAQILDSRMNTKYDENDKLIREVKVITLKSKLVSDFRKDFQFYKVREINNYHHAHDAYLNAVVGTALIKKYPKLESEFVYGDYKVYDVRKMIAKSEQEIGKATAKYFFYSNIMNFFKTEITLANGEIRKRPLIETNGETGEIVWDKGRDFATVRKVLSMPQVNIVKKTEVQTGGFSKESILPKRNSDKLIARKKDWDPKKYGGFDSPTVAYSVLVVAKVEKGKSKKLKSVKELLGITIMERSSFEKNPIDFLEAKGYKEVKKDLIIKLPKYSLFELENGRKRMLASAGELQKGNELALPSKYVNFLYLASHYEKLKGSPEDNEQKQLFVEQHKHYLDEIIEQISEFSKRVILADANLDKVLSAYNKHRDKPIREQAENIIHLFTLTNLGAPAAFKYFDTTIDRKRYTSTKEVLDATLIHQSITGLYETRIDLSQLGGDGGGGGEAAAKPAPGGMDPLQLLQPLEAEIKGTKLKAHWNSGATITCVPQAFLEEEVPIKNIWIKTIHGEKEQPVYYLTFKIQGRKVEAEVISSPYDYILVSPSDIPWLMKKPLQLTTLVPLQEYEERLLKQTMLTGSYKEKLQSLFLKYDALWQHWENQVGHRRIKPHHIATGTVNPRPQKQYPINPKAKASIQTVINDLLKQGVLIQQNSIMNTPVYPVPKPDGKWRMVLDYREVNKTIPLIAAQNQHSAGILSSIFRGKYKTTLDLSNGFWAHSITPESYWLTAFTWLGQQYCWTRLPQGFLNSPALFNADVVDLLKEVPNVQVYVDDIYISHDDPREHLEQLEKVFSLLLNAGYVVSLKKSEIAQHEVEFLGFNITKEGRGLTETFKQKLLNITPPRDLKQLQSILGKLNFARNFIPNFSELVKPLYNIIATAPGKYITWTTDNSQQLQNIISMLNSAENLEERNPEVRLIMKVNTSPSAGYIRFYNEFAKRPIMYLNYVYTKAEVKFTNTEKLLTTIHKGLIKALDLGMGQEILVYSPIVSMTKIQKTPLPERKALPIRWITWMSYLEDPRIQFHYDKTLPELQQVPTVTDDIIAKIKHPSEFSMVFYTDGSAIKHPNVNKSHNAGMGIAQVQFKPEFTVINTWSIPLGDHTAQLAEVAAVEFACKKALKIDGPVLIVTDSFYVAESVNKELPYWQSNGFFNNKKKPLKHVSKWKSIADCIQLKPDIIIIHEKGHQPTASTFHTEGNNLADKLATQGSYVVNAGKRTADGSEFEKRTADGSEFESPKKKAKVE

SEQ ID NO: 7459 - protein, 2094 aa, synthetic construct
MPAAKRVKLDGGDKKYSIGLDIGTNSVGWAVITDEYKVPSKKFKVLGNTDRHSIKKNLIGALLFDSGETAEATRLKRTARRRYTRRKNRICYLQEIFSNEMAKVDDSFFHRLEESFLVEEDKKHERHPIFGNIVDEVAYHEKYPTIYHLRKKLVDSTDKADLRLIYLALAHMIKFRGHFLIEGDLNPDNSDVDKLFIQLVQTYNQLFEENPINASGVDAKAILSARLSKSRRLENLIAQLPGEKKNGLFGNLIALSLGLTPNFKSNFDLAEDAKLQLSKDTYDDDLDNLLAQIGDQYADLFLAAKNLSDAILLSDILRVNTEITKAPLSASMIKRYDEHHQDLTLLKALVRQQLPEKYKEIFFDQSKNGYAGYIDGGASQEEFYKFIKPILEKMDGTEELLVKLNREDLLRKQRTFDNGSIPHQIHLGELHAILRRQEDFYPFLKDNREKIEKILTFRIPYYVGPLARGNSRFAWMTRKSEETITPWNFEEVVDKGASAQSFIERMTNFDKNLPNEKVLPKHSLLYEYFTVYNELTKVKYVTEGMRKPAFLSGEQKKAIVDLLFKTNRKVTVKQLKEDYFKKIECFDSVEISGVEDRFNASLGTYHDLLKIIKDKDFLDNEENEDILEDIVLTLTLFEDREMIEERLKTYAHLFDDKVMKQLKRRRYTGWGRLSRKLINGIRDKQSGKTILDFLKSDGFANRNFMQLIHDDSLTFKEDIQKAQVSGQGDSLHEHIANLAGSPAIKKGILQTVKVVDELVKVMGRHKPENIVIEMARENQTTQKGQKNSRERMKRIEEGIKELGSQILKEHPVENTQLQNEKLYLYYLQNGRDMYVDQELDINRLSDYDVDHIVPQSFLKDDSIDNKVLTRSDKARGKSDNVPSEEVVKKMKNYWRQLLNAKLITQRKFDNLTKAERGGLSELDKAGFIKRQLVETRQITKHVAQILDSRMNTKYDENDKLIREVKVITLKSKLVSDFRKDFQFYKVREINNYHHAHDAYLNAVVGTALIKKYPKLESEFVYGDYKVYDVRKMIAKSEQEIGKATAKYFFYSNIMNFFKTEITLANGEIRKRPLIETNGETGEIVWDKGRDFATVRKVLSMPQVNIVKKTEVQTGGFSKESILPKRNSDKLIARKKDWDPKKYGGFDSPTVAYSVLVVAKVEKGKSKKLKSVKELLGITIMERSSFEKNPIDFLEAKGYKEVKKDLIIKLPKYSLFELENGRKRMLASAGELQKGNELALPSKYVNFLYLASHYEKLKGSPEDNEQKQLFVEQHKHYLDEIIEQISEFSKRVILADANLDKVLSAYNKHRDKPIREQAENIIHLFTLTNLGAPAAFKYFDTTIDRKRYTSTKEVLDATLIHQSITGLYETRIDLSQLGGDGGGGGEAAAKPAPGGVLNLEEEYRLHEKPVPSSIDPSWLQLFPTVWAERAGMGLANQVPPVVVELRSGASPVAVRQYPMSKEAREGIRPHIQRFLDLGVLVPCQSPWNTPLLPVKKPGTNDYRPVQDLREINKRVQDIHPTVPNPYNLLSSLPPSHTWYSVLDLKDAFFCLKLHPNSQPLFAFEWRDPEKGNTGQLTWTRLPQGFKNSPTLFNEALHRDLAPFRALNPQVVLLQYVDDLLVAAPTYRDCKEGTQKLLQELSKLGYRVSAKKAQLCQKEVTYLGYLLKEGKRWLTPARKATVMKIPPPTTPRQVREFLGTAGFCRLWIPGFASLAAPLYPLTKPSIPFIWTEEHQKAFDRIKEALLSAPALALPDLTKPFTLYVDERAGVARGVLTQTLGPWRRPVAYLSKKLDPVASGWPTCLKAVAAVALLLKDADKLTLGQNVTVIASHSLESIVRQPPDRWMTNARMTHYQSLLLNERVSFAPPAVLNPATLLPVESEATPVHRCSEILAEETGTRRDLKDQPLPGVPAWYTDGSSFIAEGKRRAGAAIVDGKRTVWASSLPEGTSAQKAELVALTQALRLAEGKDINIYTDSRYAFATAHIHGAIYKQRGWLTSAGKDIKNKEEILALLEAIHLPKRVAIIHCPGHQKGNDPVATGNRRADEAAKQAALSTRVLAETTKPAGKRTADGSEFEKRTADGSEFESPKKKAKVE

SEQ ID NO: 7460 - protein, 2096 aa, synthetic construct
MPAAKRVKLDGGDKKYSIGLDIGTNSVGWAVITDEYKVPSKKFKVLGNTDRHSIKKNLIGALLFDSGETAEATRLKRTARRRYTRRKNRICYLQEIFSNEMAKVDDSFFHRLEESFLVEEDKKHERHPIFGNIVDEVAYHEKYPTIYHLRKKLVDSTDKADLRLIYLALAHMIKFRGHFLIEGDLNPDNSDVDKLFIQLVQTYNQLFEENPINASGVDAKAILSARLSKSRRLENLIAQLPGEKKNGLFGNLIALSLGLTPNFKSNFDLAEDAKLQLSKDTYDDDLDNLLAQIGDQYADLFLAAKNLSDAILLSDILRVNTEITKAPLSASMIKRYDEHHQDLTLLKALVRQQLPEKYKEIFFDQSKNGYAGYIDGGASQEEFYKFIKPILEKMDGTEELLVKLNREDLLRKQRTFDNGSIPHQIHLGELHAILRRQEDFYPFLKDNREKIEKILTFRIPYYVGPLARGNSRFAWMTRKSEETITPWNFEEVVDKGASAQSFIERMTNFDKNLPNEKVLPKHSLLYEYFTVYNELTKVKYVTEGMRKPAFLSGEQKKAIVDLLFKTNRKVTVKQLKEDYFKKIECFDSVEISGVEDRFNASLGTYHDLLKIIKDKDFLDNEENEDILEDIVLTLTLFEDREMIEERLKTYAHLFDDKVMKQLKRRRYTGWGRLSRKLINGIRDKQSGKTILDFLKSDGFANRNFMQLIHDDSLTFKEDIQKAQVSGQGDSLHEHIANLAGSPAIKKGILQTVKVVDELVKVMGRHKPENIVIEMARENQTTQKGQKNSRERMKRIEEGIKELGSQILKEHPVENTQLQNEKLYLYYLQNGRDMYVDQELDINRLSDYDVDHIVPQSFLKDDSIDNKVLTRSDKARGKSDNVPSEEVVKKMKNYWRQLLNAKLITQRKFDNLTKAERGGLSELDKAGFIKRQLVETRQITKHVAQILDSRMNTKYDENDKLIREVKVITLKSKLVSDFRKDFQFYKVREINNYHHAHDAYLNAVVGTALIKKYPKLESEFVYGDYKVYDVRKMIAKSEQEIGKATAKYFFYSNIMNFFKTEITLANGEIRKRPLIETNGETGEIVWDKGRDFATVRKVLSMPQVNIVKKTEVQTGGFSKESILPKRNSDKLIARKKDWDPKKYGGFDSPTVAYSVLVVAKVEKGKSKKLKSVKELLGITIMERSSFEKNPIDFLEAKGYKEVKKDLIIKLPKYSLFELENGRKRMLASAGELQKGNELALPSKYVNFLYLASHYEKLKGSPEDNEQKQLFVEQHKHYLDEIIEQISEFSKRVILADANLDKVLSAYNKHRDKPIREQAENIIHLFTLTNLGAPAAFKYFDTTIDRKRYTSTKEVLDATLIHQSITGLYETRIDLSQLGGDGGGGGEAAAKPAPGGTLNIEDEYRLHETSKEPDVPLGSTWLSDFPQAWAETGGMGLAVRQAPLIIPLKATSTPVSIKQYPMSQEARLGIKPHIQRLLDQGILVPCQSPWNTPLLPVKKPGTNDYRPVQDLREVNKRVEDIHPTVPNPYNLLSGLPPSHQWYTVLDLKDAFFCLRLHPTSQPLFAFEWRDPEMGISGQLTWTRLPQGFKNSPTLFDEALHRDLADFRIQHPDLILLQYVDDLLLAATSEQDCQRGTRALLQTLGNLGYRASAKKAQICQKQVKYLGYLLKEGQRWLTEARKETVMGQPTPKTPRQLREFLGTAGFCRLWIPGFAEMAAPLYPLTKTGTLFNWGPDQQKAYQEIKQALLTAPALGLPDLTKPFELFVDEKQGYAKGVLTQKLGPWRRPVAYLSKKLDPVAAGWPPCLRMVAAIAVLTKDAGKLTMGQPLVILAPHAVEALVKQPPDRWLSNARMTHYQAMLLDTDRVQFGPVVALNPATLLPLPEKEAPHDCLEILAETHGTRPDLTDQPIPDADYTWYTDGSSFLQEGQRRAGAAVTTETEVIWARALPAGTSAQRAELIALTQALKMAEGKKLNVYTDSRYAFATAHVHGEIYRRRGLLTSEGREIKNKNEILALLKALFLPKRLSIIHCPGHQKGNSAEARGNRMADQAAREAAMKAVLETSTLLAGKRTADGSEFEKRTADGSEFESPKKKAKVE

SEQ ID NO: 7461 - protein, 2096 aa, synthetic construct
MPAAKRVKLDGGDKKYSIGLDIGTNSVGWAVITDEYKVPSKKFKVLGNTDRHSIKKNLIGALLFDSGETAEATRLKRTARRRYTRRKNRICYLQEIFSNEMAKVDDSFFHRLEESFLVEEDKKHERHPIFGNIVDEVAYHEKYPTIYHLRKKLVDSTDKADLRLIYLALAHMIKFRGHFLIEGDLNPDNSDVDKLFIQLVQTYNQLFEENPINASGVDAKAILSARLSKSRRLENLIAQLPGEKKNGLFGNLIALSLGLTPNFKSNFDLAEDAKLQLSKDTYDDDLDNLLAQIGDQYADLFLAAKNLSDAILLSDILRVNTEITKAPLSASMIKRYDEHHQDLTLLKALVRQQLPEKYKEIFFDQSKNGYAGYIDGGASQEEFYKFIKPILEKMDGTEELLVKLNREDLLRKQRTFDNGSIPHQIHLGELHAILRRQEDFYPFLKDNREKIEKILTFRIPYYVGPLARGNSRFAWMTRKSEETITPWNFEEVVDKGASAQSFIERMTNFDKNLPNEKVLPKHSLLYEYFTVYNELTKVKYVTEGMRKPAFLSGEQKKAIVDLLFKTNRKVTVKQLKEDYFKKIECFDSVEISGVEDRFNASLGTYHDLLKIIKDKDFLDNEENEDILEDIVLTLTLFEDREMIEERLKTYAHLFDDKVMKQLKRRRYTGWGRLSRKLINGIRDKQSGKTILDFLKSDGFANRNFMQLIHDDSLTFKEDIQKAQVSGQGDSLHEHIANLAGSPAIKKGILQTVKVVDELVKVMGRHKPENIVIEMARENQTTQKGQKNSRERMKRIEEGIKELGSQILKEHPVENTQLQNEKLYLYYLQNGRDMYVDQELDINRLSDYDVDHIVPQSFLKDDSIDNKVLTRSDKARGKSDNVPSEEVVKKMKNYWRQLLNAKLITQRKFDNLTKAERGGLSELDKAGFIKRQLVETRQITKHVAQILDSRMNTKYDENDKLIREVKVITLKSKLVSDFRKDFQFYKVREINNYHHAHDAYLNAVVGTALIKKYPKLESEFVYGDYKVYDVRKMIAKSEQEIGKATAKYFFYSNIMNFFKTEITLANGEIRKRPLIETNGETGEIVWDKGRDFATVRKVLSMPQVNIVKKTEVQTGGFSKESILPKRNSDKLIARKKDWDPKKYGGFDSPTVAYSVLVVAKVEKGKSKKLKSVKELLGITIMERSSFEKNPIDFLEAKGYKEVKKDLIIKLPKYSLFELENGRKRMLASAGELQKGNELALPSKYVNFLYLASHYEKLKGSPEDNEQKQLFVEQHKHYLDEIIEQISEFSKRVILADANLDKVLSAYNKHRDKPIREQAENIIHLFTLTNLGAPAAFKYFDTTIDRKRYTSTKEVLDATLIHQSITGLYETRIDLSQLGGDGGGGGEAAAKPAPGGTLNIEDEYRLHETSKEPDVPLGSTWLSDFPQAWAETGGMGLAVRQAPLIIPLKATSTPVSIKQYPMSQEARLGIKPHIQRLLDQGILVPCQSPWNTPLLPVKKPGTNDYRPVQDLREVNKRVEDIHPTVPNPYNLLSGLPPSHQWYTVLDLKDAFFCLRLHPTSQPLFAFEWRDPEMGISGQLTWTRLPQGFKNSPTLFNEALHRDLADFRIQHPDLILLQYVDDLLLAATSEQDCQRGTRALLQTLGNLGYRASAKKAQICQKQVKYLGYLLKEGQRWLTEARKETVMGQPTPKTPRQLREFLGKAGFCRLFIPGFAEMAAPLYPLTKPGTLFNWGPDQQKAYQEIKQALLTAPALGLPDLTKPFELFVDEKQGYAKGVLTQKLGPWRRPVAYLSKKLDPVAAGWPPCLRMVAAIAVLTKDAGKLTMGQPLVILAPHAVEALVKQPPDRWLSNARMTHYQAMLLDTDRVQFGPVVALNPATLLPLPEKEAPHDCLEILAETHGTRPDLTDQPIPDADYTWYTDGSSFLQEGQRRAGAAVTTETEVIWARALPAGTSAQRAELIALTQALKMAEGKKLNVYTDSRYAFATAHVHGEIYRRRGWLTSEGREIKNKNEILALLKALFLPKRLSIIHCPGHQKGNSAEARGNRMADQAAREAAMKAVLETSTLLAGKRTADGSEFEKRTADGSEFESPKKKAKVE

SEQ ID NO: 7462 - protein, 2098 aa, synthetic construct
MPAAKRVKLDGGDKKYSIGLDIGTNSVGWAVITDEYKVPSKKFKVLGNTDRHSIKKNLIGALLFDSGETAEATRLKRTARRRYTRRKNRICYLQEIFSNEMAKVDDSFFHRLEESFLVEEDKKHERHPIFGNIVDEVAYHEKYPTIYHLRKKLVDSTDKADLRLIYLALAHMIKFRGHFLIEGDLNPDNSDVDKLFIQLVQTYNQLFEENPINASGVDAKAILSARLSKSRRLENLIAQLPGEKKNGLFGNLIALSLGLTPNFKSNFDLAEDAKLQLSKDTYDDDLDNLLAQIGDQYADLFLAAKNLSDAILLSDILRVNTEITKAPLSASMIKRYDEHHQDLTLLKALVRQQLPEKYKEIFFDQSKNGYAGYIDGGASQEEFYKFIKPILEKMDGTEELLVKLNREDLLRKQRTFDNGSIPHQIHLGELHAILRRQEDFYPFLKDNREKIEKILTFRIPYYVGPLARGNSRFAWMTRKSEETITPWNFEEVVDKGASAQSFIERMTNFDKNLPNEKVLPKHSLLYEYFTVYNELTKVKYVTEGMRKPAFLSGEQKKAIVDLLFKTNRKVTVKQLKEDYFKKIECFDSVEISGVEDRFNASLGTYHDLLKIIKDKDFLDNEENEDILEDIVLTLTLFEDREMIEERLKTYAHLFDDKVMKQLKRRRYTGWGRLSRKLINGIRDKQSGKTILDFLKSDGFANRNFMQLIHDDSLTFKEDIQKAQVSGQGDSLHEHIANLAGSPAIKKGILQTVKVVDELVKVMGRHKPENIVIEMARENQTTQKGQKNSRERMKRIEEGIKELGSQILKEHPVENTQLQNEKLYLYYLQNGRDMYVDQELDINRLSDYDVDHIVPQSFLKDDSIDNKVLTRSDKARGKSDNVPSEEVVKKMKNYWRQLLNAKLITQRKFDNLTKAERGGLSELDKAGFIKRQLVETRQITKHVAQILDSRMNTKYDENDKLIREVKVITLKSKLVSDFRKDFQFYKVREINNYHHAHDAYLNAVVGTALIKKYPKLESEFVYGDYKVYDVRKMIAKSEQEIGKATAKYFFYSNIMNFFKTEITLANGEIRKRPLIETNGETGEIVWDKGRDFATVRKVLSMPQVNIVKKTEVQTGGFSKESILPKRNSDKLIARKKDWDPKKYGGFDSPTVAYSVLVVAKVEKGKSKKLKSVKELLGITIMERSSFEKNPIDFLEAKGYKEVKKDLIIKLPKYSLFELENGRKRMLASAGELQKGNELALPSKYVNFLYLASHYEKLKGSPEDNEQKQLFVEQHKHYLDEIIEQISEFSKRVILADANLDKVLSAYNKHRDKPIREQAENIIHLFTLTNLGAPAAFKYFDTTIDRKRYTSTKEVLDATLIHQSITGLYETRIDLSQLGGDGGGGGPAPEAAAKGGTAPLEEEYRLFLEAPIQNVTLLEQWKREIPKVWAEINPPGLASTQAPIHVQLLSTALPVRVRQYPITLEAKRSLRETIRKFRAAGILRPVHSPWNTPLLPVRKSGTSEYRMVQDLREVNKRVETIHPTVPNPYTLLSLLPPDRIWYSVLDLKDAFFCIPLAPESQLIFAFEWADAEEGESGQLTWTRLPQGFKNSPTLFNEALNRDLQGFRLDHPSVSLLQYVDDLLIAADTQAACLSATRDLLMTLAELGYRVSGKKAQLCQEEVTYLGFKIHKGSRSLSNSRTQAILQIPVPKTKRQVREFLGTIGYCRLWIPGFAELAQPLYAATRPGNDPLVWGEKEEEAFQSLKLALTQPPALALPSLDKPFQLFVEETSGAAKGVLTQALGPWKRPVAYLSKRLDPVAAGWPRCLRAIAAAALLTREASKLTFGQDIEITSSHNLESLLRSPPDKWLTNARITQYQVLLLDPPRVRFKQTAALNPATLLPETDDTLPIHHCLDTLDSLTSTRPDLTDQPLAQAEATLFTDGSSYIRDGKRYAGAAVVTLDSVIWAEPLPIGTSAQKAELIALTKALEWSKDKSVNIYTDSRYAFATLHVHGMIYRERGWLTAGGKAIKNAPEILALLTAVWLPKRVAVMHCKGHQKDDAPTSTGNRRADEVAREVAIRPLSTQATISAGKRTADGSEFEKRTADGSEFESPKKKAKVE

SEQ ID NO: 7463 - protein, 2102 aa, synthetic construct
MPAAKRVKLDGGDKKYSIGLDIGTNSVGWAVITDEYKVPSKKFKVLGNTDRHSIKKNLIGALLFDSGETAEATRLKRTARRRYTRRKNRICYLQEIFSNEMAKVDDSFFHRLEESFLVEEDKKHERHPIFGNIVDEVAYHEKYPTIYHLRKKLVDSTDKADLRLIYLALAHMIKFRGHFLIEGDLNPDNSDVDKLFIQLVQTYNQLFEENPINASGVDAKAILSARLSKSRRLENLIAQLPGEKKNGLFGNLIALSLGLTPNFKSNFDLAEDAKLQLSKDTYDDDLDNLLAQIGDQYADLFLAAKNLSDAILLSDILRVNTEITKAPLSASMIKRYDEHHQDLTLLKALVRQQLPEKYKEIFFDQSKNGYAGYIDGGASQEEFYKFIKPILEKMDGTEELLVKLNREDLLRKQRTFDNGSIPHQIHLGELHAILRRQEDFYPFLKDNREKIEKILTFRIPYYVGPLARGNSRFAWMTRKSEETITPWNFEEVVDKGASAQSFIERMTNFDKNLPNEKVLPKHSLLYEYFTVYNELTKVKYVTEGMRKPAFLSGEQKKAIVDLLFKTNRKVTVKQLKEDYFKKIECFDSVEISGVEDRFNASLGTYHDLLKIIKDKDFLDNEENEDILEDIVLTLTLFEDREMIEERLKTYAHLFDDKVMKQLKRRRYTGWGRLSRKLINGIRDKQSGKTILDFLKSDGFANRNFMQLIHDDSLTFKEDIQKAQVSGQGDSLHEHIANLAGSPAIKKGILQTVKVVDELVKVMGRHKPENIVIEMARENQTTQKGQKNSRERMKRIEEGIKELGSQILKEHPVENTQLQNEKLYLYYLQNGRDMYVDQELDINRLSDYDVDHIVPQSFLKDDSIDNKVLTRSDKARGKSDNVPSEEVVKKMKNYWRQLLNAKLITQRKFDNLTKAERGGLSELDKAGFIKRQLVETRQITKHVAQILDSRMNTKYDENDKLIREVKVITLKSKLVSDFRKDFQFYKVREINNYHHAHDAYLNAVVGTALIKKYPKLESEFVYGDYKVYDVRKMIAKSEQEIGKATAKYFFYSNIMNFFKTEITLANGEIRKRPLIETNGETGEIVWDKGRDFATVRKVLSMPQVNIVKKTEVQTGGFSKESILPKRNSDKLIARKKDWDPKKYGGFDSPTVAYSVLVVAKVEKGKSKKLKSVKELLGITIMERSSFEKNPIDFLEAKGYKEVKKDLIIKLPKYSLFELENGRKRMLASAGELQKGNELALPSKYVNFLYLASHYEKLKGSPEDNEQKQLFVEQHKHYLDEIIEQISEFSKRVILADANLDKVLSAYNKHRDKPIREQAENIIHLFTLTNLGAPAAFKYFDTTIDRKRYTSTKEVLDATLIHQSITGLYETRIDLSQLGGDGGGGGPAPEAAAKGGTVSLQDEHRLFDIPVTTSLPDVWLQDFPQAWAETGGLGRAKCQAPIIIDLKPTAVPVSIKQYPMSLEAHMGIRQHIIKFLELGVLRPCRSPWNTPLLPVKKPGTQDYRPVQDLREINKRTVDIHPTVPNPYNLLSTLKPDYSWYTVLDLKDAFFCLPLAPQSQELFAFEWKDPERGISGQLTWTRLPQGFKNSPTLFNEALHRDLTDFRTQHPEVTLLQYVDDLLLAAPTKKACTQGTRHLLQELGEKGYRASAKKAQICQTKVTYLGYILSEGKRWLTPGRIETVARIPPPRNPREVREFLGTAGFCRLWIPGFAELAAPLYALTKPSTPFTWQTEHQLAFEALKKALLSAPALGLPDTSKPFTLFLDERQGIAKGVLTQKLGPWKRPVAYLSKKLDPVAAGWPPCLRIMAATAMLVKDSAKLTLGQPLTVITPHTLEAIVRQPPDRWITNARLTHYQALLLDTDRVQFGPPVTLNPATLLPVPENQPSPHDCRQVLAETHGTREDLKDQELPDADHTWYTDGSSYLDSGTRRAGAAVVDGHNTIWAQSLPPGTSAQKAELIALTKALELSKGKKANIYTDSRYAFATAHTHGSIYERRGWLTSEGKEIKNKAEIIALLKALFLPQEVAIIHCPGHQKGQDPVAVGNRQADRVARQAAMAEVLTLATEPDNTSHITAGKRTADGSEFEKRTADGSEFESPKKKAKVE

SEQ ID NO: 7464 - protein, 2173 aa, synthetic construct
MPAAKRVKLDGGDKKYSIGLDIGTNSVGWAVITDEYKVPSKKFKVLGNTDRHSIKKNLIGALLFDSGETAEATRLKRTARRRYTRRKNRICYLQEIFSNEMAKVDDSFFHRLEESFLVEEDKKHERHPIFGNIVDEVAYHEKYPTIYHLRKKLVDSTDKADLRLIYLALAHMIKFRGHFLIEGDLNPDNSDVDKLFIQLVQTYNQLFEENPINASGVDAKAILSARLSKSRRLENLIAQLPGEKKNGLFGNLIALSLGLTPNFKSNFDLAEDAKLQLSKDTYDDDLDNLLAQIGDQYADLFLAAKNLSDAILLSDILRVNTEITKAPLSASMIKRYDEHHQDLTLLKALVRQQLPEKYKEIFFDQSKNGYAGYIDGGASQEEFYKFIKPILEKMDGTEELLVKLNREDLLRKQRTFDNGSIPHQIHLGELHAILRRQEDFYPFLKDNREKIEKILTFRIPYYVGPLARGNSRFAWMTRKSEETITPWNFEEVVDKGASAQSFIERMTNFDKNLPNEKVLPKHSLLYEYFTVYNELTKVKYVTEGMRKPAFLSGEQKKAIVDLLFKTNRKVTVKQLKEDYFKKIECFDSVEISGVEDRFNASLGTYHDLLKIIKDKDFLDNEENEDILEDIVLTLTLFEDREMIEERLKTYAHLFDDKVMKQLKRRRYTGWGRLSRKLINGIRDKQSGKTILDFLKSDGFANRNFMQLIHDDSLTFKEDIQKAQVSGQGDSLHEHIANLAGSPAIKKGILQTVKVVDELVKVMGRHKPENIVIEMARENQTTQKGQKNSRERMKRIEEGIKELGSQILKEHPVENTQLQNEKLYLYYLQNGRDMYVDQELDINRLSDYDVDHIVPQSFLKDDSIDNKVLTRSDKARGKSDNVPSEEVVKKMKNYWRQLLNAKLITQRKFDNLTKAERGGLSELDKAGFIKRQLVETRQITKHVAQILDSRMNTKYDENDKLIREVKVITLKSKLVSDFRKDFQFYKVREINNYHHAHDAYLNAVVGTALIKKYPKLESEFVYGDYKVYDVRKMIAKSEQEIGKATAKYFFYSNIMNFFKTEITLANGEIRKRPLIETNGETGEIVWDKGRDFATVRKVLSMPQVNIVKKTEVQTGGFSKESILPKRNSDKLIARKKDWDPKKYGGFDSPTVAYSVLVVAKVEKGKSKKLKSVKELLGITIMERSSFEKNPIDFLEAKGYKEVKKDLIIKLPKYSLFELENGRKRMLASAGELQKGNELALPSKYVNFLYLASHYEKLKGSPEDNEQKQLFVEQHKHYLDEIIEQISEFSKRVILADANLDKVLSAYNKHRDKPIREQAENIIHLFTLTNLGAPAAFKYFDTTIDRKRYTSTKEVLDATLIHQSITGLYETRIDLSQLGGDGGGGGPAPEAAAKGGMDLLKPLTVERKGVKIKGYWNSQADITCVPKDLLQGEEPVRQQNVTTIHGTQEGDVYYVNLKIDGRRINTEVIGTTLDYAIITPGDVPWILKKPLELTIKLDLEEQQGTLLNNSILSKKGKEELKQLFEKYSALWQSWENQVGHRRIRPHKIATGTVKPTPQKQYHINPKAKPDIQIVINDLLKQGVLIQKESTMNTPVYPVPKPNGRWRMVLDYRAVNKVTPLIAVQNQHSYGILGSLFKGRYKTTIDLSNGFWAHPIVPEDYWITAFTWQGKQYCWTVLPQGFLNSPGLFTGDVVDLLQGIPNVEVYVDDVYISHDSEKEHLEYLDILFNRLKEAGYIISLKKSNIANSIVDFLGFQITNEGRGLTDTFKEKLENITAPTTLKQLQSILGLLNFARNFIPDFTELIAPLYALIPKSTKNYVPWQIEHSTTLETLITKLNGAEYLQGRKGDKTLIMKVNASYTTGYIRYYNEGEKKPISYVSIVFSKTELKFTELEKLLTTVHKGLLKALDLSMGQNIHVYSPIVSMQNIQKTPQTAKKALASRWLSWLSYLEDPRIRFFYDPQMPALKDLPAVDTGKDNKKHPSNFQHIFYTDGSAITSPTKEGHLNAGMGIVYFINKDGNLQKQQEWSISLGNHTAQFAEIAAFEFALKKCLPLGGNILVVTDSNYVAKAYNEELDVWASNGFVNNRKKPLKHISKWKSVADLKRLRPDVVVTHEPGHQKLDSSPHAYGNNLADQLATQASFKVHAGKRTADGSEFEKRTADGSEFESPKKKAKVE

SEQ ID NO: 7465 - protein, 2087 aa, synthetic construct
MPAAKRVKLDGGDKKYSIGLDIGTNSVGWAVITDEYKVPSKKFKVLGNTDRHSIKKNLIGALLFDSGETAEATRLKRTARRRYTRRKNRICYLQEIFSNEMAKVDDSFFHRLEESFLVEEDKKHERHPIFGNIVDEVAYHEKYPTIYHLRKKLVDSTDKADLRLIYLALAHMIKFRGHFLIEGDLNPDNSDVDKLFIQLVQTYNQLFEENPINASGVDAKAILSARLSKSRRLENLIAQLPGEKKNGLFGNLIALSLGLTPNFKSNFDLAEDAKLQLSKDTYDDDLDNLLAQIGDQYADLFLAAKNLSDAILLSDILRVNTEITKAPLSASMIKRYDEHHQDLTLLKALVRQQLPEKYKEIFFDQSKNGYAGYIDGGASQEEFYKFIKPILEKMDGTEELLVKLNREDLLRKQRTFDNGSIPHQIHLGELHAILRRQEDFYPFLKDNREKIEKILTFRIPYYVGPLARGNSRFAWMTRKSEETITPWNFEEVVDKGASAQSFIERMTNFDKNLPNEKVLPKHSLLYEYFTVYNELTKVKYVTEGMRKPAFLSGEQKKAIVDLLFKTNRKVTVKQLKEDYFKKIECFDSVEISGVEDRFNASLGTYHDLLKIIKDKDFLDNEENEDILEDIVLTLTLFEDREMIEERLKTYAHLFDDKVMKQLKRRRYTGWGRLSRKLINGIRDKQSGKTILDFLKSDGFANRNFMQLIHDDSLTFKEDIQKAQVSGQGDSLHEHIANLAGSPAIKKGILQTVKVVDELVKVMGRHKPENIVIEMARENQTTQKGQKNSRERMKRIEEGIKELGSQILKEHPVENTQLQNEKLYLYYLQNGRDMYVDQELDINRLSDYDVDHIVPQSFLKDDSIDNKVLTRSDKARGKSDNVPSEEVVKKMKNYWRQLLNAKLITQRKFDNLTKAERGGLSELDKAGFIKRQLVETRQITKHVAQILDSRMNTKYDENDKLIREVKVITLKSKLVSDFRKDFQFYKVREINNYHHAHDAYLNAVVGTALIKKYPKLESEFVYGDYKVYDVRKMIAKSEQEIGKATAKYFFYSNIMNFFKTEITLANGEIRKRPLIETNGETGEIVWDKGRDFATVRKVLSMPQVNIVKKTEVQTGGFSKESILPKRNSDKLIARKKDWDPKKYGGFDSPTVAYSVLVVAKVEKGKSKKLKSVKELLGITIMERSSFEKNPIDFLEAKGYKEVKKDLIIKLPKYSLFELENGRKRMLASAGELQKGNELALPSKYVNFLYLASHYEKLKGSPEDNEQKQLFVEQHKHYLDEIIEQISEFSKRVILADANLDKVLSAYNKHRDKPIREQAENIIHLFTLTNLGAPAAFKYFDTTIDRKRYTSTKEVLDATLIHQSITGLYETRIDLSQLGGDGGGGGPAPEAAAKGGVPWILKKPLELTIKLDLEEQQGTLLNNSILSKKGKEELKQLFEKYSALWQSWENQVGHRRIRPHKIATGTVKPTPQKQYHINPKAKPDIQIVINDLLKQGVLIQKESTMNTPVYPVPKPNGRWRMVLDYRAVNKVTPLIAVQNQHSYGILGSLFKGRYKTTIDLSNGFWAHPIVPEDYWITAFTWQGKQYCWTVLPQGFLNSPGLFNGDVVDLLQGIPNVEVYVDDVYISHDSEKEHLEYLDILFNRLKEAGYIISLKKSNIANSIVDFLGFQITNEGRGLTDTFKEKLENITAPTTLKQLQSILGLLNFARNFIPDFTELIAPLYALIPKSPKNYVPWQIEHSTTLETLITKLNGAEYLQGRKGDKTLIMKVNASYTTGYIRYYNEGEKKPISYVSIVFSKTELKFTELEKLLTTVHKGLLKALDLSMGQNIHVYSPIVSMQNIQKTPQTAKKALASRWLSWLSYLEDPRIRFFYDPQMPALKDLPAVDTGKDNKKHPSNFQHIFYTDGSAITSPTKEGHLNAGMGIVYFINKDGNLQKQQEWSISLGNHTAQFAEIAAFEFALKKCLPLGGNILVVTDSNYVAKAYNEELDVWASNGFVNNRKKPLKHISKWKSVADLKRLRPDVVVTHEPGHQKLDSSPHAYGNNLADQLATQASFKVHAGKRTADGSEFEKRTADGSEFESPKKKAKVE

SEQ ID NO: 7466 - protein, 2173 aa, synthetic construct
MPAAKRVKLDGGDKKYSIGLDIGTNSVGWAVITDEYKVPSKKFKVLGNTDRHSIKKNLIGALLFDSGETAEATRLKRTARRRYTRRKNRICYLQEIFSNEMAKVDDSFFHRLEESFLVEEDKKHERHPIFGNIVDEVAYHEKYPTIYHLRKKLVDSTDKADLRLIYLALAHMIKFRGHFLIEGDLNPDNSDVDKLFIQLVQTYNQLFEENPINASGVDAKAILSARLSKSRRLENLIAQLPGEKKNGLFGNLIALSLGLTPNFKSNFDLAEDAKLQLSKDTYDDDLDNLLAQIGDQYADLFLAAKNLSDAILLSDILRVNTEITKAPLSASMIKRYDEHHQDLTLLKALVRQQLPEKYKEIFFDQSKNGYAGYIDGGASQEEFYKFIKPILEKMDGTEELLVKLNREDLLRKQRTFDNGSIPHQIHLGELHAILRRQEDFYPFLKDNREKIEKILTFRIPYYVGPLARGNSRFAWMTRKSEETITPWNFEEVVDKGASAQSFIERMTNFDKNLPNEKVLPKHSLLYEYFTVYNELTKVKYVTEGMRKPAFLSGEQKKAIVDLLFKTNRKVTVKQLKEDYFKKIECFDSVEISGVEDRFNASLGTYHDLLKIIKDKDFLDNEENEDILEDIVLTLTLFEDREMIEERLKTYAHLFDDKVMKQLKRRRYTGWGRLSRKLINGIRDKQSGKTILDFLKSDGFANRNFMQLIHDDSLTFKEDIQKAQVSGQGDSLHEHIANLAGSPAIKKGILQTVKVVDELVKVMGRHKPENIVIEMARENQTTQKGQKNSRERMKRIEEGIKELGSQILKEHPVENTQLQNEKLYLYYLQNGRDMYVDQELDINRLSDYDVDHIVPQSFLKDDSIDNKVLTRSDKARGKSDNVPSEEVVKKMKNYWRQLLNAKLITQRKFDNLTKAERGGLSELDKAGFIKRQLVETRQITKHVAQILDSRMNTKYDENDKLIREVKVITLKSKLVSDFRKDFQFYKVREINNYHHAHDAYLNAVVGTALIKKYPKLESEFVYGDYKVYDVRKMIAKSEQEIGKATAKYFFYSNIMNFFKTEITLANGEIRKRPLIETNGETGEIVWDKGRDFATVRKVLSMPQVNIVKKTEVQTGGFSKESILPKRNSDKLIARKKDWDPKKYGGFDSPTVAYSVLVVAKVEKGKSKKLKSVKELLGITIMERSSFEKNPIDFLEAKGYKEVKKDLIIKLPKYSLFELENGRKRMLASAGELQKGNELALPSKYVNFLYLASHYEKLKGSPEDNEQKQLFVEQHKHYLDEIIEQISEFSKRVILADANLDKVLSAYNKHRDKPIREQAENIIHLFTLTNLGAPAAFKYFDTTIDRKRYTSTKEVLDATLIHQSITGLYETRIDLSQLGGDGGGGGPAPEAAAKGGMDLLKPLTVERKGVKIKGYWNSQADITCVPKDLLQGEEPVRQQNVTTIHGTQEGDVYYVNLKIDGRRINTEVIGTTLDYAIITPGDVPWILKKPLELTIKLDLEEQQGTLLNNSILSKKGKEELKQLFEKYSALWQSWENQVGHRRIRPHKIATGTVKPTPQKQYHINPKAKPDIQIVINDLLKQGVLIQKESTMNTPVYPVPKPNGRWRMVLDYRAVNKVTPLIAVQNQHSYGILGSLFKGRYKTTIDLSNGFWAHPIVPEDYWITAFTWQGKQYCWTVLPQGFLNSPGLFNGDVVDLLQGIPNVEVYVDDVYISHDSEKEHLEYLDILFNRLKEAGYIISLKKSNIANSIVDFLGFQITNEGRGLTDTFKEKLENITAPTTLKQLQSILGLLNFARNFIPDFTELIAPLYALIPKSPKNYVPWQIEHSTTLETLITKLNGAEYLQGRKGDKTLIMKVNASYTTGYIRYYNEGEKKPISYVSIVFSKTELKFTELEKLLTTVHKGLLKALDLSMGQNIHVYSPIVSMQNIQKTPQTAKKALASRWLSWLSYLEDPRIRFFYDPQMPALKDLPAVDTGKDNKKHPSNFQHIFYTDGSAITSPTKEGHLNAGMGIVYFINKDGNLQKQQEWSISLGNHTAQFAEIAAFEFALKKCLPLGGNILVVTDSNYVAKAYNEELDVWASNGFVNNRKKPLKHISKWKSVADLKRLRPDVVVTHEPGHQKLDSSPHAYGNNLADQLATQASFKVHAGKRTADGSEFEKRTADGSEFESPKKKAKVE

SEQ ID NO: 7467 - protein, 2094 aa, synthetic construct
MPAAKRVKLDGGDKKYSIGLDIGTNSVGWAVITDEYKVPSKKFKVLGNTDRHSIKKNLIGALLFDSGETAEATRLKRTARRRYTRRKNRICYLQEIFSNEMAKVDDSFFHRLEESFLVEEDKKHERHPIFGNIVDEVAYHEKYPTIYHLRKKLVDSTDKADLRLIYLALAHMIKFRGHFLIEGDLNPDNSDVDKLFIQLVQTYNQLFEENPINASGVDAKAILSARLSKSRRLENLIAQLPGEKKNGLFGNLIALSLGLTPNFKSNFDLAEDAKLQLSKDTYDDDLDNLLAQIGDQYADLFLAAKNLSDAILLSDILRVNTEITKAPLSASMIKRYDEHHQDLTLLKALVRQQLPEKYKEIFFDQSKNGYAGYIDGGASQEEFYKFIKPILEKMDGTEELLVKLNREDLLRKQRTFDNGSIPHQIHLGELHAILRRQEDFYPFLKDNREKIEKILTFRIPYYVGPLARGNSRFAWMTRKSEETITPWNFEEVVDKGASAQSFIERMTNFDKNLPNEKVLPKHSLLYEYFTVYNELTKVKYVTEGMRKPAFLSGEQKKAIVDLLFKTNRKVTVKQLKEDYFKKIECFDSVEISGVEDRFNASLGTYHDLLKIIKDKDFLDNEENEDILEDIVLTLTLFEDREMIEERLKTYAHLFDDKVMKQLKRRRYTGWGRLSRKLINGIRDKQSGKTILDFLKSDGFANRNFMQLIHDDSLTFKEDIQKAQVSGQGDSLHEHIANLAGSPAIKKGILQTVKVVDELVKVMGRHKPENIVIEMARENQTTQKGQKNSRERMKRIEEGIKELGSQILKEHPVENTQLQNEKLYLYYLQNGRDMYVDQELDINRLSDYDVDHIVPQSFLKDDSIDNKVLTRSDKARGKSDNVPSEEVVKKMKNYWRQLLNAKLITQRKFDNLTKAERGGLSELDKAGFIKRQLVETRQITKHVAQILDSRMNTKYDENDKLIREVKVITLKSKLVSDFRKDFQFYKVREINNYHHAHDAYLNAVVGTALIKKYPKLESEFVYGDYKVYDVRKMIAKSEQEIGKATAKYFFYSNIMNFFKTEITLANGEIRKRPLIETNGETGEIVWDKGRDFATVRKVLSMPQVNIVKKTEVQTGGFSKESILPKRNSDKLIARKKDWDPKKYGGFDSPTVAYSVLVVAKVEKGKSKKLKSVKELLGITIMERSSFEKNPIDFLEAKGYKEVKKDLIIKLPKYSLFELENGRKRMLASAGELQKGNELALPSKYVNFLYLASHYEKLKGSPEDNEQKQLFVEQHKHYLDEIIEQISEFSKRVILADANLDKVLSAYNKHRDKPIREQAENIIHLFTLTNLGAPAAFKYFDTTIDRKRYTSTKEVLDATLIHQSITGLYETRIDLSQLGGDGGGGGPAPEAAAKGGVLNLEEEYRLHEKPVPSSIDPSWLQLFPTVWAERAGMGLANQVPPVVVELRSGASPVAVRQYPMSKEAREGIRPHIQKFLDLGVLVPCRSPWNTPLLPVKKPGTNDYRPVQDLREINKRVQDIHPTVPNPYNLLSSLPPSYTWYSVLDLKDAFFCLRLHPNSQPLFAFEWKDPEKGNTGQLTWTRLPQGFKNSPTLFNEALHRDLAPFRALNPQVVLLQYVDDLLVAAPTYEDCKKGTQKLLQELSKLGYRVSAKKAQLCQREVTYLGYLLKEGKRWLTPARKATVMKIPVPTTPRQVREFLGKAGFCRLFIPGFASLAAPLYPLTKPSIPFIWTEEHQQAFDHIKKALLSAPALALPDLTKPFTLYIDERAGVARGVLTQTLGPWRRPVAYLSKKLDPVASGWPTCLKAVAAVALLLKDADKLTLGQNVTVIASHSLESIVRQPPDRWMTNARMTHYQSLLLNERVSFAPPAVLNPATLLPVESEATPVHRCSEILAEETGTRRDLEDQPLPGVPTWYTDGSSFITEGKRRAGAPIVDGKRTVWASSLPEGTSAQKAELVALTQALRLAEGKNINIYTDSRYAFATAHIHGAIYKQRGWLTSAGKDIKNKEEILALLEAIHLPRRVAIIHCPGHQRGSNPVATGNRRADEAAKQAALSTRVLAGTTKPAGKRTADGSEFEKRTADGSEFESPKKKAKVE

SEQ ID NO: 7468 - protein, 2009 aa, synthetic construct
MPAAKRVKLDGGDKKYSIGLDIGTNSVGWAVITDEYKVPSKKFKVLGNTDRHSIKKNLIGALLFDSGETAEATRLKRTARRRYTRRKNRICYLQEIFSNEMAKVDDSFFHRLEESFLVEEDKKHERHPIFGNIVDEVAYHEKYPTIYHLRKKLVDSTDKADLRLIYLALAHMIKFRGHFLIEGDLNPDNSDVDKLFIQLVQTYNQLFEENPINASGVDAKAILSARLSKSRRLENLIAQLPGEKKNGLFGNLIALSLGLTPNFKSNFDLAEDAKLQLSKDTYDDDLDNLLAQIGDQYADLFLAAKNLSDAILLSDILRVNTEITKAPLSASMIKRYDEHHQDLTLLKALVRQQLPEKYKEIFFDQSKNGYAGYIDGGASQEEFYKFIKPILEKMDGTEELLVKLNREDLLRKQRTFDNGSIPHQIHLGELHAILRRQEDFYPFLKDNREKIEKILTFRIPYYVGPLARGNSRFAWMTRKSEETITPWNFEEVVDKGASAQSFIERMTNFDKNLPNEKVLPKHSLLYEYFTVYNELTKVKYVTEGMRKPAFLSGEQKKAIVDLLFKTNRKVTVKQLKEDYFKKIECFDSVEISGVEDRFNASLGTYHDLLKIIKDKDFLDNEENEDILEDIVLTLTLFEDREMIEERLKTYAHLFDDKVMKQLKRRRYTGWGRLSRKLINGIRDKQSGKTILDFLKSDGFANRNFMQLIHDDSLTFKEDIQKAQVSGQGDSLHEHIANLAGSPAIKKGILQTVKVVDELVKVMGRHKPENIVIEMARENQTTQKGQKNSRERMKRIEEGIKELGSQILKEHPVENTQLQNEKLYLYYLQNGRDMYVDQELDINRLSDYDVDHIVPQSFLKDDSIDNKVLTRSDKARGKSDNVPSEEVVKKMKNYWRQLLNAKLITQRKFDNLTKAERGGLSELDKAGFIKRQLVETRQITKHVAQILDSRMNTKYDENDKLIREVKVITLKSKLVSDFRKDFQFYKVREINNYHHAHDAYLNAVVGTALIKKYPKLESEFVYGDYKVYDVRKMIAKSEQEIGKATAKYFFYSNIMNFFKTEITLANGEIRKRPLIETNGETGEIVWDKGRDFATVRKVLSMPQVNIVKKTEVQTGGFSKESILPKRNSDKLIARKKDWDPKKYGGFDSPTVAYSVLVVAKVEKGKSKKLKSVKELLGITIMERSSFEKNPIDFLEAKGYKEVKKDLIIKLPKYSLFELENGRKRMLASAGELQKGNELALPSKYVNFLYLASHYEKLKGSPEDNEQKQLFVEQHKHYLDEIIEQISEFSKRVILADANLDKVLSAYNKHRDKPIREQAENIIHLFTLTNLGAPAAFKYFDTTIDRKRYTSTKEVLDATLIHQSITGLYETRIDLSQLGGDGGGGGPAPEAAAKGGHLPPPPQVDQFPLNLPERLQALNDLVSKALEAGHIEPYSGPGNNPVFPVKKPNGKWRFIHDLRATNAITTTLTSPSPGPPDLTSLPTALPHLQTIDLTDAFFQIPLPKQYQPYFAFTIPQPCNYGPGTRYAWTVLPQGFKNSPTLFQQQLAAVLNPMRKMFPTSTIVQYMDDILLASPTNEELQQLSQLTLQALTTHGLPISQEKTQQTPGQIRFLGQVISPNHITYESTPTIPIKSQWTLTELQVILGEIQWVSKGTPILRKHLQSLYSALHPYRDPRACITLTPQQLHALHAIQQALQHNCRGRLNPALPLLGLISLSTSGTTSVIFQPKQNWPLAWLHTPHPPTSLCPWGHLLACTILTLDKYTLQHYGQLCQSFHHNMSKQALCDFLRNSPHPSVGILIHHMGRFHNLGSQPSGPWKTLLHLPTLLQEPRLLRPIFTLSPVVLDTAPCLFSDGSPQKAAYVLWDQTILQQDITPLPSHETHSAQKGELLALICGLRAAKPWPSLNIFLDSKYLIKYLHSLAIGAFLGTSAHQTLQAALPPLLQGKTIYLHHVRSHTNLPDPISTFNEYTDSLILAPLVPLAGKRTADGSEFEKRTADGSEFESPKKKAKVE

SEQ ID NO: 7469 - protein, 2127 aa, synthetic construct
MPAAKRVKLDGGDKKYSIGLDIGTNSVGWAVITDEYKVPSKKFKVLGNTDRHSIKKNLIGALLFDSGETAEATRLKRTARRRYTRRKNRICYLQEIFSNEMAKVDDSFFHRLEESFLVEEDKKHERHPIFGNIVDEVAYHEKYPTIYHLRKKLVDSTDKADLRLIYLALAHMIKFRGHFLIEGDLNPDNSDVDKLFIQLVQTYNQLFEENPINASGVDAKAILSARLSKSRRLENLIAQLPGEKKNGLFGNLIALSLGLTPNFKSNFDLAEDAKLQLSKDTYDDDLDNLLAQIGDQYADLFLAAKNLSDAILLSDILRVNTEITKAPLSASMIKRYDEHHQDLTLLKALVRQQLPEKYKEIFFDQSKNGYAGYIDGGASQEEFYKFIKPILEKMDGTEELLVKLNREDLLRKQRTFDNGSIPHQIHLGELHAILRRQEDFYPFLKDNREKIEKILTFRIPYYVGPLARGNSRFAWMTRKSEETITPWNFEEVVDKGASAQSFIERMTNFDKNLPNEKVLPKHSLLYEYFTVYNELTKVKYVTEGMRKPAFLSGEQKKAIVDLLFKTNRKVTVKQLKEDYFKKIECFDSVEISGVEDRFNASLGTYHDLLKIIKDKDFLDNEENEDILEDIVLTLTLFEDREMIEERLKTYAHLFDDKVMKQLKRRRYTGWGRLSRKLINGIRDKQSGKTILDFLKSDGFANRNFMQLIHDDSLTFKEDIQKAQVSGQGDSLHEHIANLAGSPAIKKGILQTVKVVDELVKVMGRHKPENIVIEMARENQTTQKGQKNSRERMKRIEEGIKELGSQILKEHPVENTQLQNEKLYLYYLQNGRDMYVDQELDINRLSDYDVDHIVPQSFLKDDSIDNKVLTRSDKARGKSDNVPSEEVVKKMKNYWRQLLNAKLITQRKFDNLTKAERGGLSELDKAGFIKRQLVETRQITKHVAQILDSRMNTKYDENDKLIREVKVITLKSKLVSDFRKDFQFYKVREINNYHHAHDAYLNAVVGTALIKKYPKLESEFVYGDYKVYDVRKMIAKSEQEIGKATAKYFFYSNIMNFFKTEITLANGEIRKRPLIETNGETGEIVWDKGRDFATVRKVLSMPQVNIVKKTEVQTGGFSKESILPKRNSDKLIARKKDWDPKKYGGFDSPTVAYSVLVVAKVEKGKSKKLKSVKELLGITIMERSSFEKNPIDFLEAKGYKEVKKDLIIKLPKYSLFELENGRKRMLASAGELQKGNELALPSKYVNFLYLASHYEKLKGSPEDNEQKQLFVEQHKHYLDEIIEQISEFSKRVILADANLDKVLSAYNKHRDKPIREQAENIIHLFTLTNLGAPAAFKYFDTTIDRKRYTSTKEVLDATLIHQSITGLYETRIDLSQLGGDGGGGGPAPEAAAKGGLLGRDLLTKLKAQIQFSTEGPQVTWEDRPAMCLVLNLEEEYRLHEKPVPPSIDPSWLQLFPMVWAEKAGMGLANQVPPVVVELKSDASPVAVRQYPMSKEAREGIRPHIQRFLDLGILVPCQSPWNTPLLPVKKPGTNDYRPVQDLREVNKRVQDIHPTVPNPYNLLSSLPPSHTWYSVLDLKDAFFCLKLHPNSQPLFAFEWRDPEKGNTGQLTWTRLPQGFKNSPTLFNEALHRDLASFRALNPQVVMLQYVDDLLVAAPTYRDCKEGTRRLLQELSKLGYRVSAKKAQLCREEVTYLGYLLKGGKRWLTPARKATVMKIPTPTTPRQVREFLGTAGFCRLWIPGFASLAAPLYPLTRPKVPFTWTEAHQEAFGRIKEALLSAPALALPDLTKPFALYVDEKEGVARGVLTQTLGPWRRPVAYLSKKLDPVASGWPTCLKAIAAVALLLKDADKLTLGQNVLVIAPHNLESIVRQPPDRWMTNARMTHYQSLLLNERVSFAPPAILNPATLLPVESDDTPIHICSEILAEETGTRPDLRDQPLPGVPAWYTDGSSFIMDGRRQAGAAIVDNKRTVWASNLPEGTSAQKAELIALTQALRLAEGKSINIYTDSRYAFATAHVHGAIYKQRGWLTSAGKDIKNKEEILALLEAIHLPKRVAIIHCPGHQRGTDPVATGNRKADEAAKQAAQSTRILTETTKNAGKRTADGSEFEKRTADGSEFESPKKKAKVE

SEQ ID NO: 7470 - protein, 2127 aa, synthetic construct
MPAAKRVKLDGGDKKYSIGLDIGTNSVGWAVITDEYKVPSKKFKVLGNTDRHSIKKNLIGALLFDSGETAEATRLKRTARRRYTRRKNRICYLQEIFSNEMAKVDDSFFHRLEESFLVEEDKKHERHPIFGNIVDEVAYHEKYPTIYHLRKKLVDSTDKADLRLIYLALAHMIKFRGHFLIEGDLNPDNSDVDKLFIQLVQTYNQLFEENPINASGVDAKAILSARLSKSRRLENLIAQLPGEKKNGLFGNLIALSLGLTPNFKSNFDLAEDAKLQLSKDTYDDDLDNLLAQIGDQYADLFLAAKNLSDAILLSDILRVNTEITKAPLSASMIKRYDEHHQDLTLLKALVRQQLPEKYKEIFFDQSKNGYAGYIDGGASQEEFYKFIKPILEKMDGTEELLVKLNREDLLRKQRTFDNGSIPHQIHLGELHAILRRQEDFYPFLKDNREKIEKILTFRIPYYVGPLARGNSRFAWMTRKSEETITPWNFEEVVDKGASAQSFIERMTNFDKNLPNEKVLPKHSLLYEYFTVYNELTKVKYVTEGMRKPAFLSGEQKKAIVDLLFKTNRKVTVKQLKEDYFKKIECFDSVEISGVEDRFNASLGTYHDLLKIIKDKDFLDNEENEDILEDIVLTLTLFEDREMIEERLKTYAHLFDDKVMKQLKRRRYTGWGRLSRKLINGIRDKQSGKTILDFLKSDGFANRNFMQLIHDDSLTFKEDIQKAQVSGQGDSLHEHIANLAGSPAIKKGILQTVKVVDELVKVMGRHKPENIVIEMARENQTTQKGQKNSRERMKRIEEGIKELGSQILKEHPVENTQLQNEKLYLYYLQNGRDMYVDQELDINRLSDYDVDHIVPQSFLKDDSIDNKVLTRSDKARGKSDNVPSEEVVKKMKNYWRQLLNAKLITQRKFDNLTKAERGGLSELDKAGFIKRQLVETRQITKHVAQILDSRMNTKYDENDKLIREVKVITLKSKLVSDFRKDFQFYKVREINNYHHAHDAYLNAVVGTALIKKYPKLESEFVYGDYKVYDVRKMIAKSEQEIGKATAKYFFYSNIMNFFKTEITLANGEIRKRPLIETNGETGEIVWDKGRDFATVRKVLSMPQVNIVKKTEVQTGGFSKESILPKRNSDKLIARKKDWDPKKYGGFDSPTVAYSVLVVAKVEKGKSKKLKSVKELLGITIMERSSFEKNPIDFLEAKGYKEVKKDLIIKLPKYSLFELENGRKRMLASAGELQKGNELALPSKYVNFLYLASHYEKLKGSPEDNEQKQLFVEQHKHYLDEIIEQISEFSKRVILADANLDKVLSAYNKHRDKPIREQAENIIHLFTLTNLGAPAAFKYFDTTIDRKRYTSTKEVLDATLIHQSITGLYETRIDLSQLGGDGGGGGPAPEAAAKGGLLGRDLLTKLKAQIQFSTEGPQVTWEDRPAMCLVLNLEEEYRLHEKPVPPSIDPSWLQLFPMVWAEKAGMGLANQVPPVVVELKSDASPVAVRQYPMSKEAREGIRPHIQRFLDLGILVPCQSPWNTPLLPVKKPGTNDYRPVQDLREVNKRVQDIHPTVPNPYNLLSSLPPSHTWYSVLDLKDAFFCLKLHPNSQPLFAFEWRDPEKGNTGQLTWTRLPQGFKNSPTLFNEALHRDLASFRALNPQVVMLQYVDDLLVAAPTYRDCKEGTRRLLQELSKLGYRVSAKKAQLCREEVTYLGYLLKGGKRWLTPARKATVMKIPTPTTPRQVREFLGKAGFCRLFIPGFASLAAPLYPLTRPKVPFTWTEAHQEAFGRIKEALLSAPALALPDLTKPFALYVDEKEGVARGVLTQTLGPWRRPVAYLSKKLDPVASGWPTCLKAIAAVALLLKDADKLTLGQNVLVIAPHNLESIVRQPPDRWMTNARMTHYQSLLLNERVSFAPPAILNPATLLPVESDDTPIHICSEILAEETGTRPDLRDQPLPGVPAWYTDGSSFIMDGRRQAGAAIVDNKRTVWASNLPEGTSAQKAELIALTQALRLAEGKSINIYTDSRYAFATAHVHGAIYKQRGWLTSAGKDIKNKEEILALLEAIHLPKRVAIIHCPGHQRGTDPVATGNRKADEAAKQAAQSTRILTETTKNAGKRTADGSEFEKRTADGSEFESPKKKAKVE

SEQ ID NO: 7471 - protein, 2096 aa, synthetic construct
MPAAKRVKLDGGDKKYSIGLDIGTNSVGWAVITDEYKVPSKKFKVLGNTDRHSIKKNLIGALLFDSGETAEATRLKRTARRRYTRRKNRICYLQEIFSNEMAKVDDSFFHRLEESFLVEEDKKHERHPIFGNIVDEVAYHEKYPTIYHLRKKLVDSTDKADLRLIYLALAHMIKFRGHFLIEGDLNPDNSDVDKLFIQLVQTYNQLFEENPINASGVDAKAILSARLSKSRRLENLIAQLPGEKKNGLFGNLIALSLGLTPNFKSNFDLAEDAKLQLSKDTYDDDLDNLLAQIGDQYADLFLAAKNLSDAILLSDILRVNTEITKAPLSASMIKRYDEHHQDLTLLKALVRQQLPEKYKEIFFDQSKNGYAGYIDGGASQEEFYKFIKPILEKMDGTEELLVKLNREDLLRKQRTFDNGSIPHQIHLGELHAILRRQEDFYPFLKDNREKIEKILTFRIPYYVGPLARGNSRFAWMTRKSEETITPWNFEEVVDKGASAQSFIERMTNFDKNLPNEKVLPKHSLLYEYFTVYNELTKVKYVTEGMRKPAFLSGEQKKAIVDLLFKTNRKVTVKQLKEDYFKKIECFDSVEISGVEDRFNASLGTYHDLLKIIKDKDFLDNEENEDILEDIVLTLTLFEDREMIEERLKTYAHLFDDKVMKQLKRRRYTGWGRLSRKLINGIRDKQSGKTILDFLKSDGFANRNFMQLIHDDSLTFKEDIQKAQVSGQGDSLHEHIANLAGSPAIKKGILQTVKVVDELVKVMGRHKPENIVIEMARENQTTQKGQKNSRERMKRIEEGIKELGSQILKEHPVENTQLQNEKLYLYYLQNGRDMYVDQELDINRLSDYDVDHIVPQSFLKDDSIDNKVLTRSDKARGKSDNVPSEEVVKKMKNYWRQLLNAKLITQRKFDNLTKAERGGLSELDKAGFIKRQLVETRQITKHVAQILDSRMNTKYDENDKLIREVKVITLKSKLVSDFRKDFQFYKVREINNYHHAHDAYLNAVVGTALIKKYPKLESEFVYGDYKVYDVRKMIAKSEQEIGKATAKYFFYSNIMNFFKTEITLANGEIRKRPLIETNGETGEIVWDKGRDFATVRKVLSMPQVNIVKKTEVQTGGFSKESILPKRNSDKLIARKKDWDPKKYGGFDSPTVAYSVLVVAKVEKGKSKKLKSVKELLGITIMERSSFEKNPIDFLEAKGYKEVKKDLIIKLPKYSLFELENGRKRMLASAGELQKGNELALPSKYVNFLYLASHYEKLKGSPEDNEQKQLFVEQHKHYLDEIIEQISEFSKRVILADANLDKVLSAYNKHRDKPIREQAENIIHLFTLTNLGAPAAFKYFDTTIDRKRYTSTKEVLDATLIHQSITGLYETRIDLSQLGGDGGGGGPAPEAAAKGGLGIEDEYRLHETSTEPDVSLGSTWLSDFPQAWAETGGMGLAVRQAPLIIPLKATSTPVSIQQYPMSHEARLGIKPHIQRLLDQGILVPCQSPWNTPLLPVKKPGTNDYRPVQDLREVNKRVEDIHPTVPNPYNLLSGLPPSHQWYTVLDLKDAFFCLRLHPTSQPLFAFEWRDPGMGISGQLTWTRLPQGFKNSPTLFNEALHRDLADFRIQHPDLILLQYVDDILLAATSELDCQQGTRALLQTLGDLGYRASAKKAQICQKQVKYLGYLLREGQRWLTEARKETVMGQPVPKTPRQLREFLGKAGFCRLFIPGFAEMAAPLYPLTKPGTLFSWGPDQQKAYQEIKQALLTAPALGLPDLTKPFELFVDEKQGYAKGVLTQKLGPWRRPVAYLSKKLDPVAAGWPPCLRMVAAIAVLTKDAGKLTMGQPLVILAPHAVEALVKQPPDRWLSNARMTHYQAMLLDTDRVQFGPVVALNPATLLPLPEEGAPHDCLEILAETHGTRPDLTDQPIPDADHTWYTDGSSFLQEGQRKAGAAVTTETEVIWAGALPAGTSAQRAELIALTQALKMAEGKRLNVYTDSRYAFATAHIHGEIYRRRGWLTSEGREIKNKSEILALLKALFLPKRLSIIHCLGHQKGDSAEARGNRLADQAAREAAIKTPPDTSTLLIAGKRTADGSEFEKRTADGSEFESPKKKAKVE

SEQ ID NO: 7472 - protein, 2096 aa, synthetic construct
MPAAKRVKLDGGDKKYSIGLDIGTNSVGWAVITDEYKVPSKKFKVLGNTDRHSIKKNLIGALLFDSGETAEATRLKRTARRRYTRRKNRICYLQEIFSNEMAKVDDSFFHRLEESFLVEEDKKHERHPIFGNIVDEVAYHEKYPTIYHLRKKLVDSTDKADLRLIYLALAHMIKFRGHFLIEGDLNPDNSDVDKLFIQLVQTYNQLFEENPINASGVDAKAILSARLSKSRRLENLIAQLPGEKKNGLFGNLIALSLGLTPNFKSNFDLAEDAKLQLSKDTYDDDLDNLLAQIGDQYADLFLAAKNLSDAILLSDILRVNTEITKAPLSASMIKRYDEHHQDLTLLKALVRQQLPEKYKEIFFDQSKNGYAGYIDGGASQEEFYKFIKPILEKMDGTEELLVKLNREDLLRKQRTFDNGSIPHQIHLGELHAILRRQEDFYPFLKDNREKIEKILTFRIPYYVGPLARGNSRFAWMTRKSEETITPWNFEEVVDKGASAQSFIERMTNFDKNLPNEKVLPKHSLLYEYFTVYNELTKVKYVTEGMRKPAFLSGEQKKAIVDLLFKTNRKVTVKQLKEDYFKKIECFDSVEISGVEDRFNASLGTYHDLLKIIKDKDFLDNEENEDILEDIVLTLTLFEDREMIEERLKTYAHLFDDKVMKQLKRRRYTGWGRLSRKLINGIRDKQSGKTILDFLKSDGFANRNFMQLIHDDSLTFKEDIQKAQVSGQGDSLHEHIANLAGSPAIKKGILQTVKVVDELVKVMGRHKPENIVIEMARENQTTQKGQKNSRERMKRIEEGIKELGSQILKEHPVENTQLQNEKLYLYYLQNGRDMYVDQELDINRLSDYDVDHIVPQSFLKDDSIDNKVLTRSDKARGKSDNVPSEEVVKKMKNYWRQLLNAKLITQRKFDNLTKAERGGLSELDKAGFIKRQLVETRQITKHVAQILDSRMNTKYDENDKLIREVKVITLKSKLVSDFRKDFQFYKVREINNYHHAHDAYLNAVVGTALIKKYPKLESEFVYGDYKVYDVRKMIAKSEQEIGKATAKYFFYSNIMNFFKTEITLANGEIRKRPLIETNGETGEIVWDKGRDFATVRKVLSMPQVNIVKKTEVQTGGFSKESILPKRNSDKLIARKKDWDPKKYGGFDSPTVAYSVLVVAKVEKGKSKKLKSVKELLGITIMERSSFEKNPIDFLEAKGYKEVKKDLIIKLPKYSLFELENGRKRMLASAGELQKGNELALPSKYVNFLYLASHYEKLKGSPEDNEQKQLFVEQHKHYLDEIIEQISEFSKRVILADANLDKVLSAYNKHRDKPIREQAENIIHLFTLTNLGAPAAFKYFDTTIDRKRYTSTKEVLDATLIHQSITGLYETRIDLSQLGGDGGGGGPAPEAAAKGGTLGIEDEYRLHETSTEPDVSLGSTWLSDFPQAWAETGGMGLAVRQAPLIIPLKATSTPVSIQQYPMSHEARLGIKPHIQRLLDQGILVPCQSPWNTPLLPVKKPGTNDYRPVQDLREVNKRVEDIHPTVPNPYNLLSGLPPSHQWYTVLDLKDAFFCLRLHPTSQPLFAFEWRDPGMGISGQLTWTRLPQGFKNSPTLFNEALHRDLADFRIQHPDLILLQYVDDILLAATSELDCQQGTRALLQTLGDLGYRASAKKAQICQKQVKYLGYLLREGQRWLTEARKETVMGQPVPKTPRQLREFLGTAGFCRLWIPGFAEMAAPLYPLTKPGTLFSWGPDQQKAYQEIKQALLTAPALGLPDLTKPFELFVDEKQGYAKGVLTQKLGPWRRPVAYLSKKLDPVAAGWPPCLRMVAAIAVLTKDAGKLTMGQPLVILAPHAVEALVKQPPDRWLSNARMTHYQAMLLDTDRVQFGPVVALNPATLLPLPEEGAPHDCLEILAETHGTRPDLTDQPIPDADHTWYTDGSSFLQEGQRKAGAAVTTETEVIWAGALPAGTSAQRAELIALTQALKMAEGKRLNVYTDSRYAFATAHIHGEIYRRRGWLTSEGREIKNKSEILALLKALFLPKRLSIIHCLGHQKGDSAEARGNRLADQAAREAAIKTPPDTSTLLAGKRTADGSEFEKRTADGSEFESPKKKAKVE

SEQ ID NO: 7473 - protein, 2096 aa, synthetic construct; identical to SEQ ID NO: 7471

SEQ ID NO: 7474 - protein, 2096 aa, synthetic construct; identical to SEQ ID NO: 7472

SEQ ID NO: 7475 - protein, 2096 aa, synthetic construct
MPAAKRVKLDGGDKKYSIGLDIGTNSVGWAVITDEYKVPSKKFKVLGNTDRHSIKKNLIGALLFDSGETAEATRLKRTARRRYTRRKNRICYLQEIFSNEMAKVDDSFFHRLEESFLVEEDKKHERHPIFGNIVDEVAYHEKYPTIYHLRKKLVDSTDKADLRLIYLALAHMIKFRGHFLIEGDLNPDNSDVDKLFIQLVQTYNQLFEENPINASGVDAKAILSARLSKSRRLENLIAQLPGEKKNGLFGNLIALSLGLTPNFKSNFDLAEDAKLQLSKDTYDDDLDNLLAQIGDQYADLFLAAKNLSDAILLSDILRVNTEITKAPLSASMIKRYDEHHQDLTLLKALVRQQLPEKYKEIFFDQSKNGYAGYIDGGASQEEFYKFIKPILEKMDGTEELLVKLNREDLLRKQRTFDNGSIPHQIHLGELHAILRRQEDFYPFLKDNREKIEKILTFRIPYYVGPLARGNSRFAWMTRKSEETITPWNFEEVVDKGASAQSFIERMTNFDKNLPNEKVLPKHSLLYEYFTVYNELTKVKYVTEGMRKPAFLSGEQKKAIVDLLFKTNRKVTVKQLKEDYFKKIECFDSVEISGVEDRFNASLGTYHDLLKIIKDKDFLDNEENEDILEDIVLTLTLFEDREMIEERLKTYAHLFDDKVMKQLKRRRYTGWGRLSRKLINGIRDKQSGKTILDFLKSDGFANRNFMQLIHDDSLTFKEDIQKAQVSGQGDSLHEHIANLAGSPAIKKGILQTVKVVDELVKVMGRHKPENIVIEMARENQTTQKGQKNSRERMKRIEEGIKELGSQILKEHPVENTQLQNEKLYLYYLQNGRDMYVDQELDINRLSDYDVDHIVPQSFLKDDSIDNKVLTRSDKARGKSDNVPSEEVVKKMKNYWRQLLNAKLITQRKFDNLTKAERGGLSELDKAGFIKRQLVETRQITKHVAQILDSRMNTKYDENDKLIREVKVITLKSKLVSDFRKDFQFYKVREINNYHHAHDAYLNAVVGTALIKKYPKLESEFVYGDYKVYDVRKMIAKSEQEIGKATAKYFFYSNIMNFFKTEITLANGEIRKRPLIETNGETGEIVWDKGRDFATVRKVLSMPQVNIVKKTEVQTGGFSKESILPKRNSDKLIARKKDWDPKKYGGFDSPTVAYSVLVVAKVEKGKSKKLKSVKELLGITIMERSSFEKNPIDFLEAKGYKEVKKDLIIKLPKYSLFELENGRKRMLASAGELQKGNELALPSKYVNFLYLASHYEKLKGSPEDNEQKQLFVEQHKHYLDEIIEQISEFSKRVILADANLDKVLSAYNKHRDKPIREQAENIIHLFTLTNLGAPAAFKYFDTTIDRKRYTSTKEVLDATLIHQSITGLYETRIDLSQLGGDGGGGGPAPEAAAKGGTLNIEDEYRLHETSKEPDVSLGSTWLSDFPQAWAETGGMGLAVRQAPLIIPLKATSTPVSIKQYPMSQEARLGIKPHIQRLLDQGILVPCQSPWNTPLLPVKKPGTNDYRPVQDLREVNKRVEDIHPTVPNPYNLLSGLPPSHQWYTVLDLKDAFFCLRLHPTSQPLFAFEWRDPEMGISGQLTWTRLPQGFKNSPTLFNEALHRDLAGFRIQHPDLILLQYVDDLLLAATSELDCQQGTRALLQTLGDLGYRASAKKAQICQKQVKYLGYLLKEGQRWLTEARKETVMGQPIPKTPRQLREFLGTAGFCRLWIPGFAEMAAPLYPLTKPGTLFNWGPDQQKAFQEIKQALLTAPALGLPDLTKPFELFVDEKQGYAKGVLTQKLGPWRRPVAYLSKKLDPVAAGWPPCLRMVAAIAVLTKDAGKLTMGQPLVILAPHAVEALVKQPPDRWLSNARMTHYQALLLDTDRVQFGPVVALNPATLLPLPEEGLQHDCLDILAEAHGTRSDLMDQPLPDADHTWYTDGSSFLQEGQRKAGAAVTTETEVIWARALPAGTSAQRAELIALTQALKMAEGKKLNVYTDSRYAFATAHIHGEIYRRRGWLTSEGKEIKNKDEILALLKALFLPKRLSIIHCPGHQKGNSAEARGNRMADQAAREVATRETPETSTLLAGKRTADGSEFEKRTADGSEFESPKKKAKVE

SEQ ID NO: 7476 - protein, 2096 aa, synthetic construct; identical to SEQ ID NO: 4534

SEQ ID NO: 7477 - protein, 2096 aa, synthetic construct
MPAAKRVKLDGGDKKYSIGLDIGTNSVGWAVITDEYKVPSKKFKVLGNTDRHSIKKNLIGALLFDSGETAEATRLKRTARRRYTRRKNRICYLQEIFSNEMAKVDDSFFHRLEESFLVEEDKKHERHPIFGNIVDEVAYHEKYPTIYHLRKKLVDSTDKADLRLIYLALAHMIKFRGHFLIEGDLNPDNSDVDKLFIQLVQTYNQLFEENPINASGVDAKAILSARLSKSRRLENLIAQLPGEKKNGLFGNLIALSLGLTPNFKSNFDLAEDAKLQLSKDTYDDDLDNLLAQIGDQYADLFLAAKNLSDAILLSDILRVNTEITKAPLSASMIKRYDEHHQDLTLLKALVRQQLPEKYKEIFFDQSKNGYAGYIDGGASQEEFYKFIKPILEKMDGTEELLVKLNREDLLRKQRTFDNGSIPHQIHLGELHAILRRQEDFYPFLKDNREKIEKILTFRIPYYVGPLARGNSRFAWMTRKSEETITPWNFEEVVDKGASAQSFIERMTNFDKNLPNEKVLPKHSLLYEYFTVYNELTKVKYVTEGMRKPAFLSGEQKKAIVDLLFKTNRKVTVKQLKEDYFKKIECFDSVEISGVEDRFNASLGTYHDLLKIIKDKDFLDNEENEDILEDIVLTLTLFEDREMIEERLKTYAHLFDDKVMKQLKRRRYTGWGRLSRKLINGIRDKQSGKTILDFLKSDGFANRNFMQLIHDDSLTFKEDIQKAQVSGQGDSLHEHIANLAGSPAIKKGILQTVKVVDELVKVMGRHKPENIVIEMARENQTTQKGQKNSRERMKRIEEGIKELGSQILKEHPVENTQLQNEKLYLYYLQNGRDMYVDQELDINRLSDYDVDHIVPQSFLKDDSIDNKVLTRSDKARGKSDNVPSEEVVKKMKNYWRQLLNAKLITQRKFDNLTKAERGGLSELDKAGFIKRQLVETRQITKHVAQILDSRMNTKYDENDKLIREVKVITLKSKLVSDFRKDFQFYKVREINNYHHAHDAYLNAVVGTALIKKYPKLESEFVYGDYKVYDVRKMIAKSEQEIGKATAKYFFYSNIMNFFKTEITLANGEIRKRPLIETNGETGEIVWDKGRDFATVRKVLSMPQVNIVKKTEVQTGGFSKESILPKRNSDKLIARKKDWDPKKYGGFDSPTVAYSVLVVAKVEKGKSKKLKSVKELLGITIMERSSFEKNPIDFLEAKGYKEVKKDLIIKLPKYSLFELENGRKRMLASAGELQKGNELALPSKYVNFLYLASHYEKLKGSPEDNEQKQLFVEQHKHYLDEIIEQISEFSKRVILADANLDKVLSAYNKHRDKPIREQAENIIHLFTLTNLGAPAAFKYFDTTIDRKRYTSTKEVLDATLIHQSITGLYETRIDLSQLGGDGGGGGPAPEAAAKGGTLNIEDEHRLHETSKEPDVSLGSTWLSDFPQAWAETGGMGLAVRQAPLIIPLKATSTPVSIKQYPMSQEARLGIKPHIQRLLDQGILVPCQSPWNTPLLPVKKPGTNDYRPVQDLREVNKRVEDIHPTVPNPYNLLSGLPPSHQWYTVLDLKDAFFCLRLHPTSQPLFAFEWRDPEMGISGQLTWTRLPQGFKNSPTLFDEALHRDLADFRIQHPDLILLQYVDDLLLAATSELDCQQGTRALLQTLGNLGYRASAKKAQICQKQVKYLGYLLKEGQRWLTEARKETVMGQPTPKTPRQLREFLGTAGFCRLWIPGFAEMAAPLYPLTKTGTLFNWGPDQQKAYQEIKQALLTAPALGLPDLTKPFELFVDEKQGYAKGVLTQKLGPWRRPVAYLSKKLDPVAAGWPPCLRMVAAIAVLTKDAGKLTMGQPLVILAPHAVEALVKQPPDRWLSNARMTHYQALLLDTDRVQFGPVVALNPATLLPLPEEGLQHNCLDILAEAHGTRPDLTDQPLPDADHTWYTDGSSLLQEGQRKAGAAVTTETEVIWAKALPAGTSAQRAELIALTQALKMAEGKKLNVYTDSRYAFATAHIHGEIYRRRGLLTSEGKEIKNKDEILALLKALFLPKRLSIIHCPGHQKGHSAEARGNRMADQAARKAAITETPDTSTLLAGKRTADGSEFEKRTADGSEFESPKKKAKVE

SEQ ID NO: 7478 - protein, 2096 aa, synthetic construct; identical to SEQ ID NO: 4534

SEQ ID NO: 7479 - protein, 2088 aa, synthetic construct
MPAAKRVKLDGGDKKYSIGLDIGTNSVGWAVITDEYKVPSKKFKVLGNTDRHSIKKNLIGALLFDSGETAEATRLKRTARRRYTRRKNRICYLQEIFSNEMAKVDDSFFHRLEESFLVEEDKKHERHPIFGNIVDEVAYHEKYPTIYHLRKKLVDSTDKADLRLIYLALAHMIKFRGHFLIEGDLNPDNSDVDKLFIQLVQTYNQLFEENPINASGVDAKAILSARLSKSRRLENLIAQLPGEKKNGLFGNLIALSLGLTPNFKSNFDLAEDAKLQLSKDTYDDDLDNLLAQIGDQYADLFLAAKNLSDAILLSDILRVNTEITKAPLSASMIKRYDEHHQDLTLLKALVRQQLPEKYKEIFFDQSKNGYAGYIDGGASQEEFYKFIKPILEKMDGTEELLVKLNREDLLRKQRTFDNGSIPHQIHLGELHAILRRQEDFYPFLKDNREKIEKILTFRIPYYVGPLARGNSRFAWMTRKSEETITPWNFEEVVDKGASAQSFIERMTNFDKNLPNEKVLPKHSLLYEYFTVYNELTKVKYVTEGMRKPAFLSGEQKKAIVDLLFKTNRKVTVKQLKEDYFKKIECFDSVEISGVEDRFNASLGTYHDLLKIIKDKDFLDNEENEDILEDIVLTLTLFEDREMIEERLKTYAHLFDDKVMKQLKRRRYTGWGRLSRKLINGIRDKQSGKTILDFLKSDGFANRNFMQLIHDDSLTFKEDIQKAQVSGQGDSLHEHIANLAGSPAIKKGILQTVKVVDELVKVMGRHKPENIVIEMARENQTTQKGQKNSRERMKRIEEGIKELGSQILKEHPVENTQLQNEKLYLYYLQNGRDMYVDQELDINRLSDYDVDHIVPQSFLKDDSIDNKVLTRSDKARGKSDNVPSEEVVKKMKNYWRQLLNAKLITQRKFDNLTKAERGGLSELDKAGFIKRQLVETRQITKHVAQILDSRMNTKYDENDKLIREVKVITLKSKLVSDFRKDFQFYKVREINNYHHAHDAYLNAVVGTALIKKYPKLESEFVYGDYKVYDVRKMIAKSEQEIGKATAKYFFYSNIMNFFKTEITLANGEIRKRPLIETNGETGEIVWDKGRDFATVRKVLSMPQVNIVKKTEVQTGGFSKESILPKRNSDKLIARKKDWDPKKYGGFDSPTVAYSVLVVAKVEKGKSKKLKSVKELLGITIMERSSFEKNPIDFLEAKGYKEVKKDLIIKLPKYSLFELENGRKRMLASAGELQKGNELALPSKYVNFLYLASHYEKLKGSPEDNEQKQLFVEQHKHYLDEIIEQISEFSKRVILADANLDKVLSAYNKHRDKPIREQAENIIHLFTLTNLGAPAAFKYFDTTIDRKRYTSTKEVLDATLIHQSITGLYETRIDLSQLGGDGGGGGPAPEAAAKGGLDDEYRLYSPLVKPDQNIQFWLEQFPQAWAETAGMGLAKQVPPQVIQLKASATPVSVRQYPLSKEAQEGIRPHVQRLIQQGILVPVQSPWNTPLLPVRKPGTNDYRPVQDLREVNKRVQDIHPTVPNPYNLLCALPPQRSWYTVLDLKDAFFCLRLHPTSQPLFAFEWRDPGTGRTGQLTWTRLPQGFKNSPTIFNEALHRDLANFRIQHPQVTLLQYVDDLLLAGATKQDCLEGTKALLLELSDLGYRASAKKAQICRREVTYLGYSLRDGQRWLTEARKKTVVQIPAPTTAKQVREFLGKAGFCRLFIPGFATLAAPLYPLTKPKGEFSWAPEHQKAFDAIKKALLSAPALALPDVTKPFTLYVDERKGVARGVLTQTLGPWRRPVAYLSKKLDPVASGWPVCLKAIAAVAILVKDADKLTLGQNITVIAPHALENIVRQPPDRWMTNARMTHYQSLLLTERVTFAPPAALNPATLLPEETDEPVTHDCHQLLIEETGVRKDLTDIPLTGEVLTWFTDGSSYVVEGKRMAGAAVVDGTRTIWASSLPEGTSAQKAELMALTQALRLAEGKSINIYTDSRYAFATAHVHGAIYKQRGWLTSAGREIKNKEEILSLLEALHLPKRLAIIHCPGHQKAKDPISRGNQMADRVAKQAAQGVNLLPAGKRTADGSEFEKRTADGSEFESPKKKAKVE

SEQ ID NO: 7480 - protein, 2088 aa, synthetic construct; identical to SEQ ID NO: 7479

SEQ ID NO: 7481 - protein, 2090 aa, synthetic construct
MPAAKRVKLDGGDKKYSIGLDIGTNSVGWAVITDEYKVPSKKFKVLGNTDRHSIKKNLIGALLFDSGETAEATRLKRTARRRYTRRKNRICYLQEIFSNEMAKVDDSFFHRLEESFLVEEDKKHERHPIFGNIVDEVAYHEKYPTIYHLRKKLVDSTDKADLRLIYLALAHMIKFRGHFLIEGDLNPDNSDVDKLFIQLVQTYNQLFEENPINASGVDAKAILSARLSKSRRLENLIAQLPGEKKNGLFGNLIALSLGLTPNFKSNFDLAEDAKLQLSKDTYDDDLDNLLAQIGDQYADLFLAAKNLSDAILLSDILRVNTEITKAPLSASMIKRYDEHHQDLTLLKALVRQQLPEKYKEIFFDQSKNGYAGYIDGGASQEEFYKFIKPILEKMDGTEELLVKLNREDLLRKQRTFDNGSIPHQIHLGELHAILRRQEDFYPFLKDNREKIEKILTFRIPYYVGPLARGNSRFAWMTRKSEETITPWNFEEVVDKGASAQSFIERMTNFDKNLPNEKVLPKHSLLYEYFTVYNELTKVKYVTEGMRKPAFLSGEQKKAIVDLLFKTNRKVTVKQLKEDYFKKIECFDSVEISGVEDRFNASLGTYHDLLKIIKDKDFLDNEENEDILEDIVLTLTLFEDREMIEERLKTYAHLFDDKVMKQLKRRRYTGWGRLSRKLINGIRDKQSGKTILDFLKSDGFANRNFMQLIHDDSLTFKEDIQKAQVSGQGDSLHEHIANLAGSPAIKKGILQTVKVVDELVKVMGRHKPENIVIEMARENQTTQKGQKNSRERMKRIEEGIKELGSQILKEHPVENTQLQNEKLYLYYLQNGRDMYVDQELDINRLSDYDVDHIVPQSFLKDDSIDNKVLTRSDKARGKSDNVPSEEVVKKMKNYWRQLLNAKLITQRKFDNLTKAERGGLSELDKAGFIKRQLVETRQITKHVAQILDSRMNTKYDENDKLIREVKVITLKSKLVSDFRKDFQFYKVREINNYHHAHDAYLNAVVGTALIKKYPKLESEFVYGDYKVYDVRKMIAKSEQEIGKATAKYFFYSNIMNFFKTEITLANGEIRKRPLIETNGETGEIVWDKGRDFATVRKVLSMPQVNIVKKTEVQTGGFSKESILPKRNSDKLIARKKDWDPKKYGGFDSPTVAYSVLVVAKVEKGKSKKLKSVKELLGITIMERSSFEKNPIDFLEAKGYKEVKKDLIIKLPKYSLFELENGRKRMLASAGELQKGNELALPSKYVNFLYLASHYEKLKGSPEDNEQKQLFVEQHKHYLDEIIEQISEFSKRVILADANLDKVLSAYNKHRDKPIREQAENIIHLFTLTNLGAPAAFKYFDTTIDRKRYTSTKEVLDATLIHQSITGLYETRIDLSQLGGDGGGGGPAPEAAAKGGTLQLDDEYRLYSPLVKPDQNIQFWLEQFPQAWAETAGMGLAKQVPPQVIQLKASATPVSVRQYPLSKEAQEGIRPHVQRLIQQGILVPVQSPWNTPLLPVRKPGTNDYRPVQDLREVNKRVQDIHPTVPNPYNLLCALPPQRSWYTVLDLKDAFFCLRLHPTSQPLFAFEWRDPGTGRTGQLTWTRLPQGFKNSPTIFDEALHRDLANFRIQHPQVTLLQYVDDLLLAGATKQDCLEGTKALLLELSDLGYRASAKKAQICRREVTYLGYSLRDGQRWLTEARKKTVVQIPAPTTAKQVREFLGTAGFCRLWIPGFATLAAPLYPLTKEKGEFSWAPEHQKAFDAIKKALLSAPALALPDVTKPFTLYVDERKGVARGVLTQTLGPWRRPVAYLSKKLDPVASGWPVCLKAIAAVAILVKDADKLTLGQNITVIAPHALENIVRQPPDRWMTNARMTHYQSLLLTERVTFAPPAALNPATLLPEETDEPVTHDCHQLLIEETGVRKDLTDIPLTGEVLTWFTDGSSYVVEGKRMAGAAVVDGTRTIWASSLPEGTSAQKAELMALTQALRLAEGKSINIYTDSRYAFATAHVHGAIYKQRGLLTSAGREIKNKEEILSLLEALHLPKRLAIIHCPGHQKAKDPISRGNQMADRVAKQAAQGVNLLAGKRTADGSEFEKRTADGSEFESPKKKAKVE

SEQ ID NO: 7482 - protein, 2176 aa, synthetic construct
MPAAKRVKLDGGDKKYSIGLDIGTNSVGWAVITDEYKVPSKKFKVLGNTDRHSIKKNLIGALLFDSGETAEATRLKRTARRRYTRRKNRICYLQEIFSNEMAKVDDSFFHRLEESFLVEEDKKHERHPIFGNIVDEVAYHEKYPTIYHLRKKLVDSTDKADLRLIYLALAHMIKFRGHFLIEGDLNPDNSDVDKLFIQLVQTYNQLFEENPINASGVDAKAILSARLSKSRRLENLIAQLPGEKKNGLFGNLIALSLGLTPNFKSNFDLAEDAKLQLSKDTYDDDLDNLLAQIGDQYADLFLAAKNLSDAILLSDILRVNTEITKAPLSASMIKRYDEHHQDLTLLKALVRQQLPEKYKEIFFDQSKNGYAGYIDGGASQEEFYKFIKPILEKMDGTEELLVKLNREDLLRKQRTFDNGSIPHQIHLGELHAILRRQEDFYPFLKDNREKIEKILTFRIPYYVGPLARGNSRFAWMTRKSEETITPWNFEEVVDKGASAQSFIERMTNFDKNLPNEKVLPKHSLLYEYFTVYNELTKVKYVTEGMRKPAFLSGEQKKAIVDLLFKTNRKVTVKQLKEDYFKKIECFDSVEISGVEDRFNASLGTYHDLLKIIKDKDFLDNEENEDILEDIVLTLTLFEDREMIEERLKTYAHLFDDKVMKQLKRRRYTGWGRLSRKLINGIRDKQSGKTILDFLKSDGFANRNFMQLIHDDSLTFKEDIQKAQVSGQGDSLHEHIANLAGSPAIKKGILQTVKVVDELVKVMGRHKPENIVIEMARENQTTQKGQKNSRERMKRIEEGIKELGSQILKEHPVENTQLQNEKLYLYYLQNGRDMYVDQELDINRLSDYDVDHIVPQSFLKDDSIDNKVLTRSDKARGKSDNVPSEEVVKKMKNYWRQLLNAKLITQRKFDNLTKAERGGLSELDKAGFIKRQLVETRQITKHVAQILDSRMNTKYDENDKLIREVKVITLKSKLVSDFRKDFQFYKVREINNYHHAHDAYLNAVVGTALIKKYPKLESEFVYGDYKVYDVRKMIAKSEQEIGKATAKYFFYSNIMNFFKTEITLANGEIRKRPLIETNGETGEIVWDKGRDFATVRKVLSMPQVNIVKKTEVQTGGFSKESILPKRNSDKLIARKKDWDPKKYGGFDSPTVAYSVLVVAKVEKGKSKKLKSVKELLGITIMERSSFEKNPIDFLEAKGYKEVKKDLIIKLPKYSLFELENGRKRMLASAGELQKGNELALPSKYVNFLYLASHYEKLKGSPEDNEQKQLFVEQHKHYLDEIIEQISEFSKRVILADANLDKVLSAYNKHRDKPIREQAENIIHLFTLTNLGAPAAFKYFDTTIDRKRYTSTKEVLDATLIHQSITGLYETRIDLSQLGGDGGGGGPAPEAAAKGGMDPLQLLQPLEAEIKGTKLKAHWNSGATITCVPEAFLEDERPIQTMLIKTIHGEKQQDVYYLTFKVQGRKVEAEVLASPYDYILLNPSDVPWLMKKPLQLTVLVPLHEYQERLLQQTALPKEQKELLQKLFLKYDALWQHWENQVGHRRIKPHNIATGTLAPRPQKQYPINPKAKPSIQIVIDDLLKQGVLIQQNSTMNTPVYPVPKPDGKWRMVLDYREVNKTIPLIAAQNQHSAGILSSIYRGKYKTTLDLTNGFWAHPITPESYWLTAFTWQGKQYCWTRLPQGFLNSPALFNADVVDLLKEIPNVQAYVDDIYISHDDPQEHLEQLEKIFSILLNAGYVVSLKKSEIAQREVEFLGFNITKEGRGLTDTFKQKLLNITPPKDLKQLQSILGKLNFARNFIPNYSELVKPLYTIVAPANGKFISWTEDNSNQLQHIISVLNQADNLEERNPETRLIIKVNSSPSAGYIRYYNEGSKRPIMYVNYIFSKAEAKFTQTEKLLTTMHKGLIKAMDLAMGQEILVYSPIVSMTKIQRTPLPERKALPVRWITWMTYLEDPRIQFHYDKSLPELQQIPNVTEDVIAKTKHPSEFAMVFYTDGSAIKHPDVNKSHSAGMGIAQVQFIPEYKIVHQWSIPLGDHTAQLAEIAAVEFACKKALKISGPVLIVTDSFYVAESANKELPYWKSNGFLNNKKKPLRHVSKWKSIAECLQLKPDIIIMHEKGHQQPMTTLHTEGNNLADKLATQGSYVVHAGKRTADGSEFEKRTADGSEFESPKKKAKVE

SEQ ID NO: 7483 - protein, 2176 aa, synthetic construct
MPAAKRVKLDGGDKKYSIGLDIGTNSVGWAVITDEYKVPSKKFKVLGNTDRHSIKKNLIGALLFDSGETAEATRLKRTARRRYTRRKNRICYLQEIFSNEMAKVDDSFFHRLEESFLVEEDKKHERHPIFGNIVDEVAYHEKYPTIYHLRKKLVDSTDKADLRLIYLALAHMIKFRGHFLIEGDLNPDNSDVDKLFIQLVQTYNQLFEENPINASGVDAKAILSARLSKSRRLENLIAQLPGEKKNGLFGNLIALSLGLTPNFKSNFDLAEDAKLQLSKDTYDDDLDNLLAQIGDQYADLFLAAKNLSDAILLSDILRVNTEITKAPLSASMIKRYDEHHQDLTLLKALVRQQLPEKYKEIFFDQSKNGYAGYIDGGASQEEFYKFIKPILEKMDGTEELLVKLNREDLLRKQRTFDNGSIPHQIHLGELHAILRRQEDFYPFLKDNREKIEKILTFRIPYYVGPLARGNSRFAWMTRKSEETITPWNFEEVVDKGASAQSFIERMTNFDKNLPNEKVLPKHSLLYEYFTVYNELTKVKYVTEGMRKPAFLSGEQKKAIVDLLFKTNRKVTVKQLKEDYFKKIECFDSVEISGVEDRFNASLGTYHDLLKIIKDKDFLDNEENEDILEDIVLTLTLFEDREMIEERLKTYAHLFDDKVMKQLKRRRYTGWGRLSRKLINGIRDKQSGKTILDFLKSDGFANRNFMQLIHDDSLTFKEDIQKAQVSGQGDSLHEHIANLAGSPAIKKGILQTVKVVDELVKVMGRHKPENIVIEMARENQTTQKGQKNSRERMKRIEEGIKELGSQILKEHPVENTQLQNEKLYLYYLQNGRDMYVDQELDINRLSDYDVDHIVPQSFLKDDSIDNKVLTRSDKARGKSDNVPSEEVVKKMKNYWRQLLNAKLITQRKFDNLTKAERGGLSELDKAGFIKRQLVETRQITKHVAQILDSRMNTKYDENDKLIREVKVITLKSKLVSDFRKDFQFYKVREINNYHHAHDAYLNAVVGTALIKKYPKLESEFVYGDYKVYDVRKMIAKSEQEIGKATAKYFFYSNIMNFFKTEITLANGEIRKRPLIETNGETGEIVWDKGRDFATVRKVLSMPQVNIVKKTEVQTGGFSKESILPKRNSDKLIARKKDWDPKKYGGFDSPTVAYSVLVVAKVEKGKSKKLKSVKELLGITIMERSSFEKNPIDFLEAKGYKEVKKDLIIKLPKYSLFELENGRKRMLASAGELQKGNELALPSKYVNFLYLASHYEKLKGSPEDNEQKQLFVEQHKHYLDEIIEQISEFSKRVILADANLDKVLSAYNKHRDKPIREQAENIIHLFTLTNLGAPAAFKYFDTTIDRKRYTSTKEVLDATLIHQSITGLYETRIDLSQLGGDGGGGGPAPEAAAKGGMNPLQLLQPLPAEVKGTKLLAHWNSGATITCIPESFLEDEQPIKQTLIKTIHGEKQQNVYYLTFKVKGRKVEAEVIASPYEYILLSPTDVPWLTQQPLQLTILVPLQEYQDRILNKTALPEEQKQQLKALFTKYDNLWQHWENQVGHRKIRPHNIATGDYPPRPQKQYPINPKAKPSIQIVIDDLLKQGVLTPQNSTMNTPVYPVPKPDGRWRMVLDYREVNKTIPLTAAQNQHSAGILATIVRQKYKTTLDLANGFWAHPITPDSYWLTAFTWQGKQYCWTRLPQGFLNSPALFNADAVDLLKEVPNVQVYVDDIYLSHDNPHEHIQQLEKVFQILLQAGYVVSLKKSEIGQRTVEFLGFNITKEGRGLTDTFKTKLLNVTPPKDLKQLQSILGLLNFARNFIPNFAELVQTLYNLIASSPGKYIEWTEDNTKQLNKVIEALNTASNLEERLPDQRLVIKVNTSPSAGYVRYYNESGKKPIMYLNYVFSKAELKFSMLEKLLTTMHKALIKAMDLAMGQEILVYSPIVSMTKIQKTPLPERKALPIRWITWMTYLEDPRIQFHYDKTLPELKHIPDVYTSSIPPLKHPSQYEGVFCTDGSAIKSPDPTKSNNAGMGIVHAIYNPEYKILNQWSIPLGHHTAQMAEIAAVEFACKKALKVPGPVLVITDSFYVAESANKELPYWKSNGFVNNKKEPLKHISKWKSIAECLSIKPDITIQHEKGHQPINTSIHTEGNALADKLATQGSYVVNAGKRTADGSEFEKRTADGSEFESPKKKAKVE

SEQ ID NO: 7484 - protein, 2094 aa, synthetic construct
MPAAKRVKLDGGDKKYSIGLDIGTNSVGWAVITDEYKVPSKKFKVLGNTDRHSIKKNLIGALLFDSGETAEATRLKRTARRRYTRRKNRICYLQEIFSNEMAKVDDSFFHRLEESFLVEEDKKHERHPIFGNIVDEVAYHEKYPTIYHLRKKLVDSTDKADLRLIYLALAHMIKFRGHFLIEGDLNPDNSDVDKLFIQLVQTYNQLFEENPINASGVDAKAILSARLSKSRRLENLIAQLPGEKKNGLFGNLIALSLGLTPNFKSNFDLAEDAKLQLSKDTYDDDLDNLLAQIGDQYADLFLAAKNLSDAILLSDILRVNTEITKAPLSASMIKRYDEHHQDLTLLKALVRQQLPEKYKEIFFDQSKNGYAGYIDGGASQEEFYKFIKPILEKMDGTEELLVKLNREDLLRKQRTFDNGSIPHQIHLGELHAILRRQEDFYPFLKDNREKIEKILTFRIPYYVGPLARGNSRFAWMTRKSEETITPWNFEEVVDKGASAQSFIERMTNFDKNLPNEKVLPKHSLLYEYFTVYNELTKVKYVTEGMRKPAFLSGEQKKAIVDLLFKTNRKVTVKQLKEDYFKKIECFDSVEISGVEDRFNASLGTYHDLLKIIKDKDFLDNEENEDILEDIVLTLTLFEDREMIEERLKTYAHLFDDKVMKQLKRRRYTGWGRLSRKLINGIRDKQSGKTILDFLKSDGFANRNFMQLIHDDSLTFKEDIQKAQVSGQGDSLHEHIANLAGSPAIKKGILQTVKVVDELVKVMGRHKPENIVIEMARENQTTQKGQKNSRERMKRIEEGIKELGSQILKEHPVENTQLQNEKLYLYYLQNGRDMYVDQELDINRLSDYDVDHIVPQSFLKDDSIDNKVLTRSDKARGKSDNVPSEEVVKKMKNYWRQLLNAKLITQRKFDNLTKAERGGLSELDKAGFIKRQLVETRQITKHVAQILDSRMNTKYDENDKLIREVKVITLKSKLVSDFRKDFQFYKVREINNYHHAHDAYLNAVVGTALIKKYPKLESEFVYGDYKVYDVRKMIAKSEQEIGKATAKYFFYSNIMNFFKTEITLANGEIRKRPLIETNGETGEIVWDKGRDFATVRKVLSMPQVNIVKKTEVQTGGFSKESILPKRNSDKLIARKKDWDPKKYGGFDSPTVAYSVLVVAKVEKGKSKKLKSVKELLGITIMERSSFEKNPIDFLEAKGYKEVKKDLIIKLPKYSLFELENGRKRMLASAGELQKGNELALPSKYVNFLYLASHYEKLKGSPEDNEQKQLFVEQHKHYLDEIIEQISEFSKRVILADANLDKVLSAYNKHRDKPIREQAENIIHLFTLTNLGAPAAFKYFDTTIDRKRYTSTKEVLDATLIHQSITGLYETRIDLSQLGGDGGGGGPAPEAAAKGGVLNLEEEYRLHEKPVPSSIDPSWLQLFPTVWAERAGMGLANQVPPVVVELRSGASPVAVRQYPMSKEAREGIRPHIQRFLDLGVLVPCQSPWNTPLLPVKKPGTNDYRPVQDLREINKRVQDIHPTVPNPYNLLSSLPPSHTWYSVLDLKDAFFCLKLHPNSQPLFAFEWRDPEKGNTGQLTWTRLPQGFKNSPTLFNEALHRDLAPFRALNPQVVLLQYVDDLLVAAPTYRDCKEGTQKLLQELSKLGYRVSAKKAQLCQKEVTYLGYLLKEGKRWLTPARKATVMKIPPPTTPRQVREFLGKAGFCRLFIPGFASLAAPLYPLTKPSIPFIWTEEHQKAFDRIKEALLSAPALALPDLTKPFTLYVDERAGVARGVLTQTLGPWRRPVAYLSKKLDPVASGWPTCLKAVAAVALLLKDADKLTLGQNVTVIASHSLESIVRQPPDRWMTNARMTHYQSLLLNERVSFAPPAVLNPATLLPVESEATPVHRCSEILAEETGTRRDLKDQPLPGVPAWYTDGSSFIAEGKRRAGAAIVDGKRTVWASSLPEGTSAQKAELVALTQALRLAEGKDINIYTDSRYAFATAHIHGAIYKQRGWLTSAGKDIKNKEEILALLEAIHLPKRVAIIHCPGHQKGNDPVATGNRRADEAAKQAALSTRVLAETTKPAGKRTADGSEFEKRTADGSEFESPKKKAKVE

SEQ ID NO: 7485 - protein, 2096 aa, synthetic construct
MPAAKRVKLDGGDKKYSIGLDIGTNSVGWAVITDEYKVPSKKFKVLGNTDRHSIKKNLIGALLFDSGETAEATRLKRTARRRYTRRKNRICYLQEIFSNEMAKVDDSFFHRLEESFLVEEDKKHERHPIFGNIVDEVAYHEKYPTIYHLRKKLVDSTDKADLRLIYLALAHMIKFRGHFLIEGDLNPDNSDVDKLFIQLVQTYNQLFEENPINASGVDAKAILSARLSKSRRLENLIAQLPGEKKNGLFGNLIALSLGLTPNFKSNFDLAEDAKLQLSKDTYDDDLDNLLAQIGDQYADLFLAAKNLSDAILLSDILRVNTEITKAPLSASMIKRYDEHHQDLTLLKALVRQQLPEKYKEIFFDQSKNGYAGYIDGGASQEEFYKFIKPILEKMDGTEELLVKLNREDLLRKQRTFDNGSIPHQIHLGELHAILRRQEDFYPFLKDNREKIEKILTFRIPYYVGPLARGNSRFAWMTRKSEETITPWNFEEVVDKGASAQSFIERMTNFDKNLPNEKVLPKHSLLYEYFTVYNELTKVKYVTEGMRKPAFLSGEQKKAIVDLLFKTNRKVTVKQLKEDYFKKIECFDSVEISGVEDRFNASLGTYHDLLKIIKDKDFLDNEENEDILEDIVLTLTLFEDREMIEERLKTYAHLFDDKVMKQLKRRRYTGWGRLSRKLINGIRDKQSGKTILDFLKSDGFANRNFMQLIHDDSLTFKEDIQKAQVSGQGDSLHEHIANLAGSPAIKKGILQTVKVVDELVKVMGRHKPENIVIEMARENQTTQKGQKNSRERMKRIEEGIKELGSQILKEHPVENTQLQNEKLYLYYLQNGRDMYVDQELDINRLSDYDVDHIVPQSFLKDDSIDNKVLTRSDKARGKSDNVPSEEVVKKMKNYWRQLLNAKLITQRKFDNLTKAERGGLSELDKAGFIKRQLVETRQITKHVAQILDSRMNTKYDENDKLIREVKVITLKSKLVSDFRKDFQFYKVREINNYHHAHDAYLNAVVGTALIKKYPKLESEFVYGDYKVYDVRKMIAKSEQEIGKATAKYFFYSNIMNFFKTEITLANGEIRKRPLIETNGETGEIVWDKGRDFATVRKVLSMPQVNIVKKTEVQTGGFSKESILPKRNSDKLIARKKDWDPKKYGGFDSPTVAYSVLVVAKVEKGKSKKLKSVKELLGITIMERSSFEKNPIDFLEAKGYKEVKKDLIIKLPKYSLFELENGRKRMLASAGELQKGNELALPSKYVNFLYLASHYEKLKGSPEDNEQKQLFVEQHKHYLDEIIEQISEFSKRVILADANLDKVLSAYNKHRDKPIREQAENIIHLFTLTNLGAPAAFKYFDTTIDRKRYTSTKEVLDATLIHQSITGLYETRIDLSQLGGDGGGGGPAPEAAAKGGTLNIEDEYRLHETSKEPDVPLGSTWLSDFPQAWAETGGMGLAVRQAPLIIPLKATSTPVSIKQYPMSQEARLGIKPHIQRLLDQGILVPCQSPWNTPLLPVKKPGTNDYRPVQDLREVNKRVEDIHPTVPNPYNLLSGLPPSHQWYTVLDLKDAFFCLRLHPTSQPLFAFEWRDPEMGISGQLTWTRLPQGFKNSPTLFNEALHRDLADFRIQHPDLILLQYVDDLLLAATSEQDCQRGTRALLQTLGNLGYRASAKKAQICQKQVKYLGYLLKEGQRWLTEARKETVMGQPTPKTPRQLREFLGTAGFCRLWIPGFAEMAAPLYPLTKPGTLFNWGPDQQKAYQEIKQALLTAPALGLPDLTKPFELFVDEKQGYAKGVLTQKLGPWRRPVAYLSKKLDPVAAGWPPCLRMVAAIAVLTKDAGKLTMGQPLVILAPHAVEALVKQPPDRWLSNARMTHYQAMLLDTDRVQFGPVVALNPATLLPLPEKEAPHDCLEILAETHGTRPDLTDQPIPDADYTWYTDGSSFLQEGQRRAGAAVTTETEVIWARALPAGTSAQRAELIALTQALKMAEGKKLNVYTDSRYAFATAHVHGEIYRRRGWLTSEGREIKNKNEILALLKALFLPKRLSIIHCPGHQKGNSAEARGNRMADQAAREAAMKAVLETSTLLAGKRTADGSEFEKRTADGSEFESPKKKAKVE

SEQ ID NO: 7486 - protein, 2098 aa, synthetic construct
MPAAKRVKLDGGDKKYSIGLDIGTNSVGWAVITDEYKVPSKKFKVLGNTDRHSIKKNLIGALLFDSGETAEATRLKRTARRRYTRRKNRICYLQEIFSNEMAKVDDSFFHRLEESFLVEEDKKHERHPIFGNIVDEVAYHEKYPTIYHLRKKLVDSTDKADLRLIYLALAHMIKFRGHFLIEGDLNPDNSDVDKLFIQLVQTYNQLFEENPINASGVDAKAILSARLSKSRRLENLIAQLPGEKKNGLFGNLIALSLGLTPNFKSNFDLAEDAKLQLSKDTYDDDLDNLLAQIGDQYADLFLAAKNLSDAILLSDILRVNTEITKAPLSASMIKRYDEHHQDLTLLKALVRQQLPEKYKEIFFDQSKNGYAGYIDGGASQEEFYKFIKPILEKMDGTEELLVKLNREDLLRKQRTFDNGSIPHQIHLGELHAILRRQEDFYPFLKDNREKIEKILTFRIPYYVGPLARGNSRFAWMTRKSEETITPWNFEEVVDKGASAQSFIERMTNFDKNLPNEKVLPKHSLLYEYFTVYNELTKVKYVTEGMRKPAFLSGEQKKAIVDLLFKTNRKVTVKQLKEDYFKKIECFDSVEISGVEDRFNASLGTYHDLLKIIKDKDFLDNEENEDILEDIVLTLTLFEDREMIEERLKTYAHLFDDKVMKQLKRRRYTGWGRLSRKLINGIRDKQSGKTILDFLKSDGFANRNFMQLIHDDSLTFKEDIQKAQVSGQGDSLHEHIANLAGSPAIKKGILQTVKVVDELVKVMGRHKPENIVIEMARENQTTQKGQKNSRERMKRIEEGIKELGSQILKEHPVENTQLQNEKLYLYYLQNGRDMYVDQELDINRLSDYDVDHIVPQSFLKDDSIDNKVLTRSDKARGKSDNVPSEEVVKKMKNYWRQLLNAKLITQRKFDNLTKAERGGLSELDKAGFIKRQLVETRQITKHVAQILDSRMNTKYDENDKLIREVKVITLKSKLVSDFRKDFQFYKVREINNYHHAHDAYLNAVVGTALIKKYPKLESEFVYGDYKVYDVRKMIAKSEQEIGKATAKYFFYSNIMNFFKTEITLANGEIRKRPLIETNGETGEIVWDKGRDFATVRKVLSMPQVNIVKKTEVQTGGFSKESILPKRNSDKLIARKKDWDPKKYGGFDSPTVAYSVLVVAKVEKGKSKKLKSVKELLGITIMERSSFEKNPIDFLEAKGYKEVKKDLIIKLPKYSLFELENGRKRMLASAGELQKGNELALPSKYVNFLYLASHYEKLKGSPEDNEQKQLFVEQHKHYLDEIIEQISEFSKRVILADANLDKVLSAYNKHRDKPIREQAENIIHLFTLTNLGAPAAFKYFDTTIDRKRYTSTKEVLDATLIHQSITGLYETRIDLSQLGGDGGEAAAKGGGPAPGGTAPLEEEYRLFLEAPIQNVTLLEQWKREIPKVWAEINPPGLASTQAPIHVQLLSTALPVRVRQYPITLEAKRSLRETIRKFRAAGILRPVHSPWNTPLLPVRKSGTSEYRMVQDLREVNKRVETIHPTVPNPYTLLSLLPPDRIWYSVLDLKDAFFCIPLAPESQLIFAFEWADAEEGESGQLTWTRLPQGFKNSPTLFDEALNRDLQGFRLDHPSVSLLQYVDDLLIAADTQAACLSATRDLLMTLAELGYRVSGKKAQLCQEEVTYLGFKIHKGSRSLSNSRTQAILQIPVPKTKRQVREFLGTIGYCRLWIPGFAELAQPLYAATRGGNDPLVWGEKEEEAFQSLKLALTQPPALALPSLDKPFQLFVEETSGAAKGVLTQALGPWKRPVAYLSKRLDPVAAGWPRCLRAIAAAALLTREASKLTFGQDIEITSSHNLESLLRSPPDKWLTNARITQYQVLLLDPPRVRFKQTAALNPATLLPETDDTLPIHHCLDTLDSLTSTRPDLTDQPLAQAEATLFTDGSSYIRDGKRYAGAAVVTLDSVIWAEPLPIGTSAQKAELIALTKALEWSKDKSVNIYTDSRYAFATLHVHGMIYRERGLLTAGGKAIKNAPEILALLTAVWLPKRVAVMHCKGHQKDDAPTSTGNRRADEVAREVAIRPLSTQATISAGKRTADGSEFEKRTADGSEFESPKKKAKVE

SEQ ID NO: 7487 - protein, 2098 aa, synthetic construct
MPAAKRVKLDGGDKKYSIGLDIGTNSVGWAVITDEYKVPSKKFKVLGNTDRHSIKKNLIGALLFDSGETAEATRLKRTARRRYTRRKNRICYLQEIFSNEMAKVDDSFFHRLEESFLVEEDKKHERHPIFGNIVDEVAYHEKYPTIYHLRKKLVDSTDKADLRLIYLALAHMIKFRGHFLIEGDLNPDNSDVDKLFIQLVQTYNQLFEENPINASGVDAKAILSARLSKSRRLENLIAQLPGEKKNGLFGNLIALSLGLTPNFKSNFDLAEDAKLQLSKDTYDDDLDNLLAQIGDQYADLFLAAKNLSDAILLSDILRVNTEITKAPLSASMIKRYDEHHQDLTLLKALVRQQLPEKYKEIFFDQSKNGYAGYIDGGASQEEFYKFIKPILEKMDGTEELLVKLNREDLLRKQRTFDNGSIPHQIHLGELHAILRRQEDFYPFLKDNREKIEKILTFRIPYYVGPLARGNSRFAWMTRKSEETITPWNFEEVVDKGASAQSFIERMTNFDKNLPNEKVLPKHSLLYEYFTVYNELTKVKYVTEGMRKPAFLSGEQKKAIVDLLFKTNRKVTVKQLKEDYFKKIECFDSVEISGVEDRFNASLGTYHDLLKIIKDKDFLDNEENEDILEDIVLTLTLFEDREMIEERLKTYAHLFDDKVMKQLKRRRYTGWGRLSRKLINGIRDKQSGKTILDFLKSDGFANRNFMQLIHDDSLTFKEDIQKAQVSGQGDSLHEHIANLAGSPAIKKGILQTVKVVDELVKVMGRHKPENIVIEMARENQTTQKGQKNSRERMKRIEEGIKELGSQILKEHPVENTQLQNEKLYLYYLQNGRDMYVDQELDINRLSDYDVDHIVPQSFLKDDSIDNKVLTRSDKARGKSDNVPSEEVVKKMKNYWRQLLNAKLITQRKFDNLTKAERGGLSELDKAGFIKRQLVETRQITKHVAQILDSRMNTKYDENDKLIREVKVITLKSKLVSDFRKDFQFYKVREINNYHHAHDAYLNAVVGTALIKKYPKLESEFVYGDYKVYDVRKMIAKSEQEIGKATAKYFFYSNIMNFFKTEITLANGEIRKRPLIETNGETGEIVWDKGRDFATVRKVLSMPQVNIVKKTEVQTGGFSKESILPKRNSDKLIARKKDWDPKKYGGFDSPTVAYSVLVVAKVEKGKSKKLKSVKELLGITIMERSSFEKNPIDFLEAKGYKEVKKDLIIKLPKYSLFELENGRKRMLASAGELQKGNELALPSKYVNFLYLASHYEKLKGSPEDNEQKQLFVEQHKHYLDEIIEQISEFSKRVILADANLDKVLSAYNKHRDKPIREQAENIIHLFTLTNLGAPAAFKYFDTTIDRKRYTSTKEVLDATLIHQSITGLYETRIDLSQLGGDGGEAAAKGGGPAPGGTAPLEEEYRLFLEAPIQNVTLLEQWKREIPKVWAEINPPGLASTQAPIHVQLLSTALPVRVRQYPITLEAKRSLRETIRKFRAAGILRPVHSPWNTPLLPVRKSGTSEYRMVQDLREVNKRVETIHPTVPNPYTLLSLLPPDRIWYSVLDLKDAFFCIPLAPESQLIFAFEWADAEEGESGQLTWTRLPQGFKNSPTLFNEALNRDLQGFRLDHPSVSLLQYVDDLLIAADTQAACLSATRDLLMTLAELGYRVSGKKAQLCQEEVTYLGFKIHKGSRSLSNSRTQAILQIPVPKTKRQVREFLGTIGYCRLWIPGFAELAQPLYAATRPGNDPLVWGEKEEEAFQSLKLALTQPPALALPSLDKPFQLFVEETSGAAKGVLTQALGPWKRPVAYLSKRLDPVAAGWPRCLRAIAAAALLTREASKLTFGQDIEITSSHNLESLLRSPPDKWLTNARITQYQVLLLDPPRVRFKQTAALNPATLLPETDDTLPIHHCLDTLDSLTSTRPDLTDQPLAQAEATLFTDGSSYIRDGKRYAGAAVVTLDSVIWAEPLPIGTSAQKAELIALTKALEWSKDKSVNIYTDSRYAFATLHVHGMIYRERGWLTAGGKAIKNAPEILALLTAVWLPKRVAVMHCKGHQKDDAPTSTGNRRADEVAREVAIRPLSTQATISAGKRTADGSEFEKRTADGSEFESPKKKAKVE

SEQ ID NO: 7488 - protein, 2098 aa, synthetic construct
MPAAKRVKLDGGDKKYSIGLDIGTNSVGWAVITDEYKVPSKKFKVLGNTDRHSIKKNLIGALLFDSGETAEATRLKRTARRRYTRRKNRICYLQEIFSNEMAKVDDSFFHRLEESFLVEEDKKHERHPIFGNIVDEVAYHEKYPTIYHLRKKLVDSTDKADLRLIYLALAHMIKFRGHFLIEGDLNPDNSDVDKLFIQLVQTYNQLFEENPINASGVDAKAILSARLSKSRRLENLIAQLPGEKKNGLFGNLIALSLGLTPNFKSNFDLAEDAKLQLSKDTYDDDLDNLLAQIGDQYADLFLAAKNLSDAILLSDILRVNTEITKAPLSASMIKRYDEHHQDLTLLKALVRQQLPEKYKEIFFDQSKNGYAGYIDGGASQEEFYKFIKPILEKMDGTEELLVKLNREDLLRKQRTFDNGSIPHQIHLGELHAILRRQEDFYPFLKDNREKIEKILTFRIPYYVGPLARGNSRFAWMTRKSEETITPWNFEEVVDKGASAQSFIERMTNFDKNLPNEKVLPKHSLLYEYFTVYNELTKVKYVTEGMRKPAFLSGEQKKAIVDLLFKTNRKVTVKQLKEDYFKKIECFDSVEISGVEDRFNASLGTYHDLLKIIKDKDFLDNEENEDILEDIVLTLTLFEDREMIEERLKTYAHLFDDKVMKQLKRRRYTGWGRLSRKLINGIRDKQSGKTILDFLKSDGFANRNFMQLIHDDSLTFKEDIQKAQVSGQGDSLHEHIANLAGSPAIKKGILQTVKVVDELVKVMGRHKPENIVIEMARENQTTQKGQKNSRERMKRIEEGIKELGSQILKEHPVENTQLQNEKLYLYYLQNGRDMYVDQELDINRLSDYDVDHIVPQSFLKDDSIDNKVLTRSDKARGKSDNVPSEEVVKKMKNYWRQLLNAKLITQRKFDNLTKAERGGLSELDKAGFIKRQLVETRQITKHVAQILDSRMNTKYDENDKLIREVKVITLKSKLVSDFRKDFQFYKVREINNYHHAHDAYLNAVVGTALIKKYPKLESEFVYGDYKVYDVRKMIAKSEQEIGKATAKYFFYSNIMNFFKTEITLANGEIRKRPLIETNGETGEIVWDKGRDFATVRKVLSMPQVNIVKKTEVQTGGFSKESILPKRNSDKLIARKKDWDPKKYGGFDSPTVAYSVLVVAKVEKGKSKKLKSVKELLGITIMERSSFEKNPIDFLEAKGYKEVKKDLIIKLPKYSLFELENGRKRMLASAGELQKGNELALPSKYVNFLYLASHYEKLKGSPEDNEQKQLFVEQHKHYLDEIIEQISEFSKRVILADANLDKVLSAYNKHRDKPIREQAENIIHLFTLTNLGAPAAFKYFDTTIDRKRYTSTKEVLDATLIHQSITGLYETRIDLSQLGGDGGEAAAKGGGPAPGGTAPLEEEYRLFLEAPIQNVTLLEQWKREIPKVWAEINPPGLASTQAPIHVQLLSTALPVRVRQYPITLEAKRSLRETIRKFRAAGILRPVHSPWNTPLLPVRKSGTSEYRMVQDLREVNKRVETIHPTVPNPYTLLSLLPPDRIWYSVLDLKDAFFCIPLAPESQLIFAFEWADAEEGESGQLTWTRLPQGFKNSPTLFNEALNRDLQGFRLDHPSVSLLQYVDDLLIAADTQAACLSATRDLLMTLAELGYRVSGKKAQLCQEEVTYLGFKIHKGSRSLSNSRTQAILQIPVPKTKRQVREFLGKIGYCRLFIPGFAELAQPLYAATRPGNDPLVWGEKEEEAFQSLKLALTQPPALALPSLDKPFQLFVEETSGAAKGVLTQALGPWKRPVAYLSKRLDPVAAGWPRCLRAIAAAALLTREASKLTFGQDIEITSSHNLESLLRSPPDKWLTNARITQYQVLLLDPPRVRFKQTAALNPATLLPETDDTLPIHHCLDTLDSLTSTRPDLTDQPLAQAEATLFTDGSSYIRDGKRYAGAAVVTLDSVIWAEPLPIGTSAQKAELIALTKALEWSKDKSVNIYTDSRYAFATLHVHGMIYRERGWLTAGGKAIKNAPEILALLTAVWLPKRVAVMHCKGHQKDDAPTSTGNRRADEVAREVAIRPLSTQATISAGKRTADGSEFEKRTADGSEFESPKKKAKVE

SEQ ID NO: 7489 - protein, 2102 aa, synthetic construct
MPAAKRVKLDGGDKKYSIGLDIGTNSVGWAVITDEYKVPSKKFKVLGNTDRHSIKKNLIGALLFDSGETAEATRLKRTARRRYTRRKNRICYLQEIFSNEMAKVDDSFFHRLEESFLVEEDKKHERHPIFGNIVDEVAYHEKYPTIYHLRKKLVDSTDKADLRLIYLALAHMIKFRGHFLIEGDLNPDNSDVDKLFIQLVQTYNQLFEENPINASGVDAKAILSARLSKSRRLENLIAQLPGEKKNGLFGNLIALSLGLTPNFKSNFDLAEDAKLQLSKDTYDDDLDNLLAQIGDQYADLFLAAKNLSDAILLSDILRVNTEITKAPLSASMIKRYDEHHQDLTLLKALVRQQLPEKYKEIFFDQSKNGYAGYIDGGASQEEFYKFIKPILEKMDGTEELLVKLNREDLLRKQRTFDNGSIPHQIHLGELHAILRRQEDFYPFLKDNREKIEKILTFRIPYYVGPLARGNSRFAWMTRKSEETITPWNFEEVVDKGASAQSFIERMTNFDKNLPNEKVLPKHSLLYEYFTVYNELTKVKYVTEGMRKPAFLSGEQKKAIVDLLFKTNRKVTVKQLKEDYFKKIECFDSVEISGVEDRFNASLGTYHDLLKIIKDKDFLDNEENEDILEDIVLTLTLFEDREMIEERLKTYAHLFDDKVMKQLKRRRYTGWGRLSRKLINGIRDKQSGKTILDFLKSDGFANRNFMQLIHDDSLTFKEDIQKAQVSGQGDSLHEHIANLAGSPAIKKGILQTVKVVDELVKVMGRHKPENIVIEMARENQTTQKGQKNSRERMKRIEEGIKELGSQILKEHPVENTQLQNEKLYLYYLQNGRDMYVDQELDINRLSDYDVDHIVPQSFLKDDSIDNKVLTRSDKARGKSDNVPSEEVVKKMKNYWRQLLNAKLITQRKFDNLTKAERGGLSELDKAGFIKRQLVETRQITKHVAQILDSRMNTKYDENDKLIREVKVITLKSKLVSDFRKDFQFYKVREINNYHHAHDAYLNAVVGTALIKKYPKLESEFVYGDYKVYDVRKMIAKSEQEIGKATAKYFFYSNIMNFFKTEITLANGEIRKRPLIETNGETGEIVWDKGRDFATVRKVLSMPQVNIVKKTEVQTGGFSKESILPKRNSDKLIARKKDWDPKKYGGFDSPTVAYSVLVVAKVEKGKSKKLKSVKELLGITIMERSSFEKNPIDFLEAKGYKEVKKDLIIKLPKYSLFELENGRKRMLASAGELQKGNELALPSKYVNFLYLASHYEKLKGSPEDNEQKQLFVEQHKHYLDEIIEQISEFSKRVILADANLDKVLSAYNKHRDKPIREQAENIIHLFTLTNLGAPAAFKYFDTTIDRKRYTSTKEVLDATLIHQSITGLYETRIDLSQLGGDGGEAAAKGGGPAPGGTVSLQDEHRLFDIPVTTSLPDVWLQDFPQAWAETGGLGRAKCQAPIIIDLKPTAVPVSIKQYPMSLEAHMGIRQHIIKFLELGVLRPCRSPWNTPLLPVKKPGTQDYRPVQDLREINKRTVDIHPTVPNPYNLLSTLKPDYSWYTVLDLKDAFFCLPLAPQSQELFAFEWKDPERGISGQLTWTRLPQGFKNSPTLFDEALHRDLTDFRTQHPEVTLLQYVDDLLLAAPTKKACTQGTRHLLQELGEKGYRASAKKAQICQTKVTYLGYILSEGKRWLTPGRIETVARIPPPRNPREVREFLGTAGFCRLWIPGFAELAAPLYALTKESTPFTWQTEHQLAFEALKKALLSAPALGLPDTSKPFTLFLDERQGIAKGVLTQKLGPWKRPVAYLSKKLDPVAAGWPPCLRIMAATAMLVKDSAKLTLGQPLTVITPHTLEAIVRQPPDRWITNARLTHYQALLLDTDRVQFGPPVTLNPATLLPVPENQPSPHDCRQVLAETHGTREDLKDQELPDADHTWYTDGSSYLDSGTRRAGAAVVDGHNTIWAQSLPPGTSAQKAELIALTKALELSKGKKANIYTDSRYAFATAHTHGSIYERRGLLTSEGKEIKNKAEIIALLKALFLPQEVAIIHCPGHQKGQDPVAVGNRQADRVARQAAMAEVLTLATEPDNTSHITAGKRTADGSEFEKRTADGSEFESPKKKAKVE

SEQ ID NO: 7490 - protein, 2102 aa, synthetic construct
MPAAKRVKLDGGDKKYSIGLDIGTNSVGWAVITDEYKVPSKKFKVLGNTDRHSIKKNLIGALLFDSGETAEATRLKRTARRRYTRRKNRICYLQEIFSNEMAKVDDSFFHRLEESFLVEEDKKHERHPIFGNIVDEVAYHEKYPTIYHLRKKLVDSTDKADLRLIYLALAHMIKFRGHFLIEGDLNPDNSDVDKLFIQLVQTYNQLFEENPINASGVDAKAILSARLSKSRRLENLIAQLPGEKKNGLFGNLIALSLGLTPNFKSNFDLAEDAKLQLSKDTYDDDLDNLLAQIGDQYADLFLAAKNLSDAILLSDILRVNTEITKAPLSASMIKRYDEHHQDLTLLKALVRQQLPEKYKEIFFDQSKNGYAGYIDGGASQEEFYKFIKPILEKMDGTEELLVKLNREDLLRKQRTFDNGSIPHQIHLGELHAILRRQEDFYPFLKDNREKIEKILTFRIPYYVGPLARGNSRFAWMTRKSEETITPWNFEEVVDKGASAQSFIERMTNFDKNLPNEKVLPKHSLLYEYFTVYNELTKVKYVTEGMRKPAFLSGEQKKAIVDLLFKTNRKVTVKQLKEDYFKKIECFDSVEISGVEDRFNASLGTYHDLLKIIKDKDFLDNEENEDILEDIVLTLTLFEDREMIEERLKTYAHLFDDKVMKQLKRRRYTGWGRLSRKLINGIRDKQSGKTILDFLKSDGFANRNFMQLIHDDSLTFKEDIQKAQVSGQGDSLHEHIANLAGSPAIKKGILQTVKVVDELVKVMGRHKPENIVIEMARENQTTQKGQKNSRERMKRIEEGIKELGSQILKEHPVENTQLQNEKLYLYYLQNGRDMYVDQELDINRLSDYDVDHIVPQSFLKDDSIDNKVLTRSDKARGKSDNVPSEEVVKKMKNYWRQLLNAKLITQRKFDNLTKAERGGLSELDKAGFIKRQLVETRQITKHVAQILDSRMNTKYDENDKLIREVKVITLKSKLVSDFRKDFQFYKVREINNYHHAHDAYLNAVVGTALIKKYPKLESEFVYGDYKVYDVRKMIAKSEQEIGKATAKYFFYSNIMNFFKTEITLANGEIRKRPLIETNGETGEIVWDKGRDFATVRKVLSMPQVNIVKKTEVQTGGFSKESILPKRNSDKLIARKKDWDPKKYGGFDSPTVAYSVLVVAKVEKGKSKKLKSVKELLGITIMERSSFEKNPIDFLEAKGYKEVKKDLIIKLPKYSLFELENGRKRMLASAGELQKGNELALPSKYVNFLYLASHYEKLKGSPEDNEQKQLFVEQHKHYLDEIIEQISEFSKRVILADANLDKVLSAYNKHRDKPIREQAENIIHLFTLTNLGAPAAFKYFDTTIDRKRYTSTKEVLDATLIHQSITGLYETRIDLSQLGGDGGEAAAKGGGPAPGGTVSLQDEHRLFDIPVTTSLPDVWLQDFPQAWAETGGLGRAKCQAPIIIDLKPTAVPVSIKQYPMSLEAHMGIRQHIIKFLELGVLRPCRSPWNTPLLPVKKPGTQDYRPVQDLREINKRTVDIHPTVPNPYNLLSTLKPDYSWYTVLDLKDAFFCLPLAPQSQELFAFEWKDPERGISGQLTWTRLPQGFKNSPTLFNEALHRDLTDFRTQHPEVTLLQYVDDLLLAAPTKKACTQGTRHLLQELGEKGYRASAKKAQICQTKVTYLGYILSEGKRWLTPGRIETVARIPPPRNPREVREFLGTAGFCRLWIPGFAELAAPLYALTKPSTPFTWQTEHQLAFEALKKALLSAPALGLPDTSKPFTLFLDERQGIAKGVLTQKLGPWKRPVAYLSKKLDPVAAGWPPCLRIMAATAMLVKDSAKLTLGQPLTVITPHTLEAIVRQPPDRWITNARLTHYQALLLDTDRVQFGPPVTLNPATLLPVPENQPSPHDCRQVLAETHGTREDLKDQELPDADHTWYTDGSSYLDSGTRRAGAAVVDGHNTIWAQSLPPGTSAQKAELIALTKALELSKGKKANIYTDSRYAFATAHTHGSIYERRGWLTSEGKEIKNKAEIIALLKALFLPQEVAIIHCPGHQKGQDPVAVGNRQADRVARQAAMAEVLTLATEPDNTSHITAGKRTADGSEFEKRTADGSEFESPKKKAKVE

SEQ ID NO: 7491 - protein, 2173 aa, synthetic construct
MPAAKRVKLDGGDKKYSIGLDIGTNSVGWAVITDEYKVPSKKFKVLGNTDRHSIKKNLIGALLFDSGETAEATRLKRTARRRYTRRKNRICYLQEIFSNEMAKVDDSFFHRLEESFLVEEDKKHERHPIFGNIVDEVAYHEKYPTIYHLRKKLVDSTDKADLRLIYLALAHMIKFRGHFLIEGDLNPDNSDVDKLFIQLVQTYNQLFEENPINASGVDAKAILSARLSKSRRLENLIAQLPGEKKNGLFGNLIALSLGLTPNFKSNFDLAEDAKLQLSKDTYDDDLDNLLAQIGDQYADLFLAAKNLSDAILLSDILRVNTEITKAPLSASMIKRYDEHHQDLTLLKALVRQQLPEKYKEIFFDQSKNGYAGYIDGGASQEEFYKFIKPILEKMDGTEELLVKLNREDLLRKQRTFDNGSIPHQIHLGELHAILRRQEDFYPFLKDNREKIEKILTFRIPYYVGPLARGNSRFAWMTRKSEETITPWNFEEVVDKGASAQSFIERMTNFDKNLPNEKVLPKHSLLYEYFTVYNELTKVKYVTEGMRKPAFLSGEQKKAIVDLLFKTNRKVTVKQLKEDYFKKIECFDSVEISGVEDRFNASLGTYHDLLKIIKDKDFLDNEENEDILEDIVLTLTLFEDREMIEERLKTYAHLFDDKVMKQLKRRRYTGWGRLSRKLINGIRDKQSGKTILDFLKSDGFANRNFMQLIHDDSLTFKEDIQKAQVSGQGDSLHEHIANLAGSPAIKKGILQTVKVVDELVKVMGRHKPENIVIEMARENQTTQKGQKNSRERMKRIEEGIKELGSQILKEHPVENTQLQNEKLYLYYLQNGRDMYVDQELDINRLSDYDVDHIVPQSFLKDDSIDNKVLTRSDKARGKSDNVPSEEVVKKMKNYWRQLLNAKLITQRKFDNLTKAERGGLSELDKAGFIKRQLVETRQITKHVAQILDSRMNTKYDENDKLIREVKVITLKSKLVSDFRKDFQFYKVREINNYHHAHDAYLNAVVGTALIKKYPKLESEFVYGDYKVYDVRKMIAKSEQEIGKATAKYFFYSNIMNFFKTEITLANGEIRKRPLIETNGETGEIVWDKGRDFATVRKVLSMPQVNIVKKTEVQTGGFSKESILPKRNSDKLIARKKDWDPKKYGGFDSPTVAYSVLVVAKVEKGKSKKLKSVKELLGITIMERSSFEKNPIDFLEAKGYKEVKKDLIIKLPKYSLFELENGRKRMLASAGELQKGNELALPSKYVNFLYLASHYEKLKGSPEDNEQKQLFVEQHKHYLDEIIEQISEFSKRVILADANLDKVLSAYNKHRDKPIREQAENIIHLFTLTNLGAPAAFKYFDTTIDRKRYTSTKEVLDATLIHQSITGLYETRIDLSQLGGDGGEAAAKGGGPAPGGMDLLKPLTVERKGVKIKGYWNSQADITCVPKDLLQGEEPVRQQNVTTIHGTQEGDVYYVNLKIDGRRINTEVIGTTLDYAIITPGDVPWILKKPLELTIKLDLEEQQGTLLNNSILSKKGKEELKQLFEKYSALWQSWENQVGHRRIRPHKIATGTVKPTPQKQYHINPKAKPDIQIVINDLLKQGVLIQKESTMNTPVYPVPKPNGRWRMVLDYRAVNKVTPLIAVQNQHSYGILGSLFKGRYKTTIDLSNGFWAHPIVPEDYWITAFTWQGKQYCWTVLPQGFLNSPGLFTGDVVDLLQGIPNVEVYVDDVYISHDSEKEHLEYLDILFNRLKEAGYIISLKKSNIANSIVDFLGFQITNEGRGLTDTFKEKLENITAPTTLKQLQSILGLLNFARNFIPDFTELIAPLYALIPKSTKNYVPWQIEHSTTLETLITKLNGAEYLQGRKGDKTLIMKVNASYTTGYIRYYNEGEKKPISYVSIVFSKTELKFTELEKLLTTVHKGLLKALDLSMGQNIHVYSPIVSMQNIQKTPQTAKKALASRWLSWLSYLEDPRIRFFYDPQMPALKDLPAVDTGKDNKKHPSNFQHIFYTDGSAITSPTKEGHLNAGMGIVYFINKDGNLQKQQEWSISLGNHTAQFAEIAAFEFALKKCLPLGGNILVVTDSNYVAKAYNEELDVWASNGFVNNRKKPLKHISKWKSVADLKRLRPDVVVTHEPGHQKLDSSPHAYGNNLADQLATQASFKVHAGKRTADGSEFEKRTADGSEFESPKKKAKVE

SEQ ID NO: 7492 - protein, 2094 aa, synthetic construct
MPAAKRVKLDGGDKKYSIGLDIGTNSVGWAVITDEYKVPSKKFKVLGNTDRHSIKKNLIGALLFDSGETAEATRLKRTARRRYTRRKNRICYLQEIFSNEMAKVDDSFFHRLEESFLVEEDKKHERHPIFGNIVDEVAYHEKYPTIYHLRKKLVDSTDKADLRLIYLALAHMIKFRGHFLIEGDLNPDNSDVDKLFIQLVQTYNQLFEENPINASGVDAKAILSARLSKSRRLENLIAQLPGEKKNGLFGNLIALSLGLTPNFKSNFDLAEDAKLQLSKDTYDDDLDNLLAQIGDQYADLFLAAKNLSDAILLSDILRVNTEITKAPLSASMIKRYDEHHQDLTLLKALVRQQLPEKYKEIFFDQSKNGYAGYIDGGASQEEFYKFIKPILEKMDGTEELLVKLNREDLLRKQRTFDNGSIPHQIHLGELHAILRRQEDFYPFLKDNREKIEKILTFRIPYYVGPLARGNSRFAWMTRKSEETITPWNFEEVVDKGASAQSFIERMTNFDKNLPNEKVLPKHSLLYEYFTVYNELTKVKYVTEGMRKPAFLSGEQKKAIVDLLFKTNRKVTVKQLKEDYFKKIECFDSVEISGVEDRFNASLGTYHDLLKIIKDKDFLDNEENEDILEDIVLTLTLFEDREMIEERLKTYAHLFDDKVMKQLKRRRYTGWGRLSRKLINGIRDKQSGKTILDFLKSDGFANRNFMQLIHDDSLTFKEDIQKAQVSGQGDSLHEHIANLAGSPAIKKGILQTVKVVDELVKVMGRHKPENIVIEMARENQTTQKGQKNSRERMKRIEEGIKELGSQILKEHPVENTQLQNEKLYLYYLQNGRDMYVDQELDINRLSDYDVDHIVPQSFLKDDSIDNKVLTRSDKARGKSDNVPSEEVVKKMKNYWRQLLNAKLITQRKFDNLTKAERGGLSELDKAGFIKRQLVETRQITKHVAQILDSRMNTKYDENDKLIREVKVITLKSKLVSDFRKDFQFYKVREINNYHHAHDAYLNAVVGTALIKKYPKLESEFVYGDYKVYDVRKMIAKSEQEIGKATAKYFFYSNIMNFFKTEITLANGEIRKRPLIETNGETGEIVWDKGRDFATVRKVLSMPQVNIVKKTEVQTGGFSKESILPKRNSDKLIARKKDWDPKKYGGFDSPTVAYSVLVVAKVEKGKSKKLKSVKELLGITIMERSSFEKNPIDFLEAKGYKEVKKDLIIKLPKYSLFELENGRKRMLASAGELQKGNELALPSKYVNFLYLASHYEKLKGSPEDNEQKQLFVEQHKHYLDEIIEQISEFSKRVILADANLDKVLSAYNKHRDKPIREQAENIIHLFTLTNLGAPAAFKYFDTTIDRKRYTSTKEVLDATLIHQSITGLYETRIDLSQLGGDGGEAAAKGGGPAPGGVLNLEEEYRLHEKPVPSSIDPSWLQLFPTVWAERAGMGLANQVPPVVVELRSGASPVAVRQYPMSKEAREGIRPHIQKFLDLGVLVPCRSPWNTPLLPVKKPGTNDYRPVQDLREINKRVQDIHPTVPNPYNLLSSLPPSYTWYSVLDLKDAFFCLRLHPNSQPLFAFEWKDPEKGNTGQLTWTRLPQGFKNSPTLFDEALHRDLAPFRALNPQVVLLQYVDDLLVAAPTYEDCKKGTQKLLQELSKLGYRVSAKKAQLCQREVTYLGYLLKEGKRWLTPARKATVMKIPVPTTPRQVREFLGTAGFCRLWIPGFASLAAPLYPLTKESIPFIWTEEHQQAFDHIKKALLSAPALALPDLTKPFTLYIDERAGVARGVLTQTLGPWRRPVAYLSKKLDPVASGWPTCLKAVAAVALLLKDADKLTLGQNVTVIASHSLESIVRQPPDRWMTNARMTHYQSLLLNERVSFAPPAVLNPATLLPVESEATPVHRCSEILAEETGTRRDLEDQPLPGVPTWYTDGSSFITEGKRRAGAPIVDGKRTVWASSLPEGTSAQKAELVALTQALRLAEGKNINIYTDSRYAFATAHIHGAIYKQRGLLTSAGKDIKNKEEILALLEAIHLPRRVAIIHCPGHQRGSNPVATGNRRADEAAKQAALSTRVLAGTTKPAGKRTADGSEFEKRTADGSEFESPKKKAKVE

SEQ ID NO: 7493 - protein, 2218 aa, synthetic construct
MPAAKRVKLDGGDKKYSIGLDIGTNSVGWAVITDEYKVPSKKFKVLGNTDRHSIKKNLIGALLFDSGETAEATRLKRTARRRYTRRKNRICYLQEIFSNEMAKVDDSFFHRLEESFLVEEDKKHERHPIFGNIVDEVAYHEKYPTIYHLRKKLVDSTDKADLRLIYLALAHMIKFRGHFLIEGDLNPDNSDVDKLFIQLVQTYNQLFEENPINASGVDAKAILSARLSKSRRLENLIAQLPGEKKNGLFGNLIALSLGLTPNFKSNFDLAEDAKLQLSKDTYDDDLDNLLAQIGDQYADLFLAAKNLSDAILLSDILRVNTEITKAPLSASMIKRYDEHHQDLTLLKALVRQQLPEKYKEIFFDQSKNGYAGYIDGGASQEEFYKFIKPILEKMDGTEELLVKLNREDLLRKQRTFDNGSIPHQIHLGELHAILRRQEDFYPFLKDNREKIEKILTFRIPYYVGPLARGNSRFAWMTRKSEETITPWNFEEVVDKGASAQSFIERMTNFDKNLPNEKVLPKHSLLYEYFTVYNELTKVKYVTEGMRKPAFLSGEQKKAIVDLLFKTNRKVTVKQLKEDYFKKIECFDSVEISGVEDRFNASLGTYHDLLKIIKDKDFLDNEENEDILEDIVLTLTLFEDREMIEERLKTYAHLFDDKVMKQLKRRRYTGWGRLSRKLINGIRDKQSGKTILDFLKSDGFANRNFMQLIHDDSLTFKEDIQKAQVSGQGDSLHEHIANLAGSPAIKKGILQTVKVVDELVKVMGRHKPENIVIEMARENQTTQKGQKNSRERMKRIEEGIKELGSQILKEHPVENTQLQNEKLYLYYLQNGRDMYVDQELDINRLSDYDVDHIVPQSFLKDDSIDNKVLTRSDKARGKSDNVPSEEVVKKMKNYWRQLLNAKLITQRKFDNLTKAERGGLSELDKAGFIKRQLVETRQITKHVAQILDSRMNTKYDENDKLIREVKVITLKSKLVSDFRKDFQFYKVREINNYHHAHDAYLNAVVGTALIKKYPKLESEFVYGDYKVYDVRKMIAKSEQEIGKATAKYFFYSNIMNFFKTEITLANGEIRKRPLIETNGETGEIVWDKGRDFATVRKVLSMPQVNIVKKTEVQTGGFSKESILPKRNSDKLIARKKDWDPKKYGGFDSPTVAYSVLVVAKVEKGKSKKLKSVKELLGITIMERSSFEKNPIDFLEAKGYKEVKKDLIIKLPKYSLFELENGRKRMLASAGELQKGNELALPSKYVNFLYLASHYEKLKGSPEDNEQKQLFVEQHKHYLDEIIEQISEFSKRVILADANLDKVLSAYNKHRDKPIREQAENIIHLFTLTNLGAPAAFKYFDTTIDRKRYTSTKEVLDATLIHQSITGLYETRIDLSQLGGDGGEAAAKGGGPAPGGTLGDQGSRGSDPLPEPRVTLTVEGIPTEFLVNTGAEHSVLTKPMGKMGSKRTVVAGATGSKVYPWTTKRLLKIGQKQVTHSFLVIPECPAPLLGRDLLTKLKAQIQFSTEGPQVTWEDRPAMCLVLNLEEEYRLHEKPVPPSIDPSWLQLFPMVWAEKAGMGLANQVPPVVVELKSDASPVAVRQYPMSKEAREGIRPHIQRFLDLGILVPCQSPWNTPLLPVKKPGTNDYRPVQDLREVNKRVQDIHPTVPNPYNLLSSLPPSHTWYSVLDLKDAFFCLKLHPNSQPLFAFEWRDPEKGNTGQLTWTRLPQGFKNSPTLFDEALHRDLASFRALNPQVVMLQYVDDLLVAAPTYRDCKEGTRRLLQELSKLGYRVSAKKAQLCREEVTYLGYLLKGGKRWLTPARKATVMKIPTPTTPRQVREFLGTAGFCRLWIPGFASLAAPLYPLTREKVPFTWTEAHQEAFGRIKEALLSAPALALPDLTKPFALYVDEKEGVARGVLTQTLGPWRRPVAYLSKKLDPVASGWPTCLKAIAAVALLLKDADKLTLGQNVLVIAPHNLESIVRQPPDRWMTNARMTHYQSLLLNERVSFAPPAILNPATLLPVESDDTPIHICSEILAEETGTRPDLRDQPLPGVPAWYTDGSSFIMDGRRQAGAAIVDNKRTVWASNLPEGTSAQKAELIALTQALRLAEGKSINIYTDSRYAFATAHVHGAIYKQRGLLTSAGKDIKNKEEILALLEAIHLPKRVAIIHCPGHQRGTDPVATGNRKADEAAKQAAQSTRILTETTKNAGKRTADGSEFEKRTADGSEFESPKKKAKVE

SEQ ID NO: 7494 - protein, 2127 aa, synthetic construct
MPAAKRVKLDGGDKKYSIGLDIGTNSVGWAVITDEYKVPSKKFKVLGNTDRHSIKKNLIGALLFDSGETAEATRLKRTARRRYTRRKNRICYLQEIFSNEMAKVDDSFFHRLEESFLVEEDKKHERHPIFGNIVDEVAYHEKYPTIYHLRKKLVDSTDKADLRLIYLALAHMIKFRGHFLIEGDLNPDNSDVDKLFIQLVQTYNQLFEENPINASGVDAKAILSARLSKSRRLENLIAQLPGEKKNGLFGNLIALSLGLTPNFKSNFDLAEDAKLQLSKDTYDDDLDNLLAQIGDQYADLFLAAKNLSDAILLSDILRVNTEITKAPLSASMIKRYDEHHQDLTLLKALVRQQLPEKYKEIFFDQSKNGYAGYIDGGASQEEFYKFIKPILEKMDGTEELLVKLNREDLLRKQRTFDNGSIPHQIHLGELHAILRRQEDFYPFLKDNREKIEKILTFRIPYYVGPLARGNSRFAWMTRKSEETITPWNFEEVVDKGASAQSFIERMTNFDKNLPNEKVLPKHSLLYEYFTVYNELTKVKYVTEGMRKPAFLSGEQKKAIVDLLFKTNRKVTVKQLKEDYFKKIECFDSVEISGVEDRFNASLGTYHDLLKIIKDKDFLDNEENEDILEDIVLTLTLFEDREMIEERLKTYAHLFDDKVMKQLKRRRYTGWGRLSRKLINGIRDKQSGKTILDFLKSDGFANRNFMQLIHDDSLTFKEDIQKAQVSGQGDSLHEHIANLAGSPAIKKGILQTVKVVDELVKVMGRHKPENIVIEMARENQTTQKGQKNSRERMKRIEEGIKELGSQILKEHPVENTQLQNEKLYLYYLQNGRDMYVDQELDINRLSDYDVDHIVPQSFLKDDSIDNKVLTRSDKARGKSDNVPSEEVVKKMKNYWRQLLNAKLITQRKFDNLTKAERGGLSELDKAGFIKRQLVETRQITKHVAQILDSRMNTKYDENDKLIREVKVITLKSKLVSDFRKDFQFYKVREINNYHHAHDAYLNAVVGTALIKKYPKLESEFVYGDYKVYDVRKMIAKSEQEIGKATAKYFFYSNIMNFFKTEITLANGEIRKRPLIETNGETGEIVWDKGRDFATVRKVLSMPQVNIVKKTEVQTGGFSKESILPKRNSDKLIARKKDWDPKKYGGFDSPTVAYSVLVVAKVEKGKSKKLKSVKELLGITIMERSSFEKNPIDFLEAKGYKEVKKDLIIKLPKYSLFELENGRKRMLASAGELQKGNELALPSKYVNFLYLASHYEKLKGSPEDNEQKQLFVEQHKHYLDEIIEQISEFSKRVILADANLDKVLSAYNKHRDKPIREQAENIIHLFTLTNLGAPAAFKYFDTTIDRKRYTSTKEVLDATLIHQSITGLYETRIDLSQLGGDGGEAAAKGGGPAPGGLLGRDLLTKLKAQIQFSTEGPQVTWEDRPAMCLVLNLEEEYRLHEKPVPPSIDPSWLQLFPMVWAEKAGMGLANQVPPVVVELKSDASPVAVRQYPMSKEAREGIRPHIQRFLDLGILVPCQSPWNTPLLPVKKPGTNDYRPVQDLREVNKRVQDIHPTVPNPYNLLSSLPPSHTWYSVLDLKDAFFCLKLHPNSQPLFAFEWRDPEKGNTGQLTWTRLPQGFKNSPTLFNEALHRDLASFRALNPQVVMLQYVDDLLVAAPTYRDCKEGTRRLLQELSKLGYRVSAKKAQLCREEVTYLGYLLKGGKRWLTPARKATVMKIPTPTTPRQVREFLGKAGFCRLFIPGFASLAAPLYPLTRPKVPFTWTEAHQEAFGRIKEALLSAPALALPDLTKPFALYVDEKEGVARGVLTQTLGPWRRPVAYLSKKLDPVASGWPTCLKAIAAVALLLKDADKLTLGQNVLVIAPHNLESIVRQPPDRWMTNARMTHYQSLLLNERVSFAPPAILNPATLLPVESDDTPIHICSEILAEETGTRPDLRDQPLPGVPAWYTDGSSFIMDGRRQAGAAIVDNKRTVWASNLPEGTSAQKAELIALTQALRLAEGKSINIYTDSRYAFATAHVHGAIYKQRGWLTSAGKDIKNKEEILALLEAIHLPKRVAIIHCPGHQRGTDPVATGNRKADEAAKQAAQSTRILTETTKNAGKRTADGSEFEKRTADGSEFESPKKKAKVE

SEQ ID NO: 7495 - protein, 2096 aa, synthetic construct
MPAAKRVKLDGGDKKYSIGLDIGTNSVGWAVITDEYKVPSKKFKVLGNTDRHSIKKNLIGALLFDSGETAEATRLKRTARRRYTRRKNRICYLQEIFSNEMAKVDDSFFHRLEESFLVEEDKKHERHPIFGNIVDEVAYHEKYPTIYHLRKKLVDSTDKADLRLIYLALAHMIKFRGHFLIEGDLNPDNSDVDKLFIQLVQTYNQLFEENPINASGVDAKAILSARLSKSRRLENLIAQLPGEKKNGLFGNLIALSLGLTPNFKSNFDLAEDAKLQLSKDTYDDDLDNLLAQIGDQYADLFLAAKNLSDAILLSDILRVNTEITKAPLSASMIKRYDEHHQDLTLLKALVRQQLPEKYKEIFFDQSKNGYAGYIDGGASQEEFYKFIKPILEKMDGTEELLVKLNREDLLRKQRTFDNGSIPHQIHLGELHAILRRQEDFYPFLKDNREKIEKILTFRIPYYVGPLARGNSRFAWMTRKSEETITPWNFEEVVDKGASAQSFIERMTNFDKNLPNEKVLPKHSLLYEYFTVYNELTKVKYVTEGMRKPAFLSGEQKKAIVDLLFKTNRKVTVKQLKEDYFKKIECFDSVEISGVEDRFNASLGTYHDLLKIIKDKDFLDNEENEDILEDIVLTLTLFEDREMIEERLKTYAHLFDDKVMKQLKRRRYTGWGRLSRKLINGIRDKQSGKTILDFLKSDGFANRNFMQLIHDDSLTFKEDIQKAQVSGQGDSLHEHIANLAGSPAIKKGILQTVKVVDELVKVMGRHKPENIVIEMARENQTTQKGQKNSRERMKRIEEGIKELGSQILKEHPVENTQLQNEKLYLYYLQNGRDMYVDQELDINRLSDYDVDHIVPQSFLKDDSIDNKVLTRSDKARGKSDNVPSEEVVKKMKNYWRQLLNAKLITQRKFDNLTKAERGGLSELDKAGFIKRQLVETRQITKHVAQILDSRMNTKYDENDKLIREVKVITLKSKLVSDFRKDFQFYKVREINNYHHAHDAYLNAVVGTALIKKYPKLESEFVYGDYKVYDVRKMIAKSEQEIGKATAKYFFYSNIMNFFKTEITLANGEIRKRPLIETNGETGEIVWDKGRDFATVRKVLSMPQVNIVKKTEVQTGGFSKESILPKRNSDKLIARKKDWDPKKYGGFDSPTVAYSVLVVAKVEKGKSKKLKSVKELLGITIMERSSFEKNPIDFLEAKGYKEVKKDLIIKLPKYSLFELENGRKRMLASAGELQKGNELALPSKYVNFLYLASHYEKLKGSPEDNEQKQLFVEQHKHYLDEIIEQISEFSKRVILADANLDKVLSAYNKHRDKPIREQAENIIHLFTLTNLGAPAAFKYFDTTIDRKRYTSTKEVLDATLIHQSITGLYETRIDLSQLGGDGGEAAAKGGGPAPGGTLGIEDEYRLHETSTEPDVSLGSTWLSDFPQAWAETGGMGLAVRQAPLIIPLKATSTPVSIQQYPMSHEARLGIKPHIQRLLDQGILVPCQSPWNTPLLPVKKPGTNDYRPVQDLREVNKRVEDIHPTVPNPYNLLSGLPPSHQWYTVLDLKDAFFCLRLHPTSQPLFAFEWRDPGMGISGQLTWTRLPQGFKNSPTLFNEALHRDLADFRIQHPDLILLQYVDDILLAATSELDCQQGTRALLQTLGDLGYRASAKKAQICQKQVKYLGYLLREGQRWLTEARKETVMGQPVPKTPRQLREFLGTAGFCRLWIPGFAEMAAPLYPLTKPGTLFSWGPDQQKAYQEIKQALLTAPALGLPDLTKPFELFVDEKQGYAKGVLTQKLGPWRRPVAYLSKKLDPVAAGWPPCLRMVAAIAVLTKDAGKLTMGQPLVILAPHAVEALVKQPPDRWLSNARMTHYQAMLLDTDRVQFGPVVALNPATLLPLPEEGAPHDCLEILAETHGTRPDLTDQPIPDADHTWYTDGSSFLQEGQRKAGAAVTTETEVIWAGALPAGTSAQRAELIALTQALKMAEGKRLNVYTDSRYAFATAHIHGEIYRRRGWLTSEGREIKNKSEILALLKALFLPKRLSIIHCLGHQKGDSAEARGNRLADQAAREAAIKTPPDTSTLLAGKRTADGSEFEKRTADGSEFESPKKKAKVE

SEQ ID NO: 7496 - protein, 2096 aa, synthetic construct; identical to SEQ ID NO: 4535

SEQ ID NO: 7497 - protein, 2096 aa, synthetic construct; identical to SEQ ID NO: 4535

SEQ ID NO: 7498 - protein, 2176 aa, synthetic construct
MPAAKRVKLDGGDKKYSIGLDIGTNSVGWAVITDEYKVPSKKFKVLGNTDRHSIKKNLIGALLFDSGETAEATRLKRTARRRYTRRKNRICYLQEIFSNEMAKVDDSFFHRLEESFLVEEDKKHERHPIFGNIVDEVAYHEKYPTIYHLRKKLVDSTDKADLRLIYLALAHMIKFRGHFLIEGDLNPDNSDVDKLFIQLVQTYNQLFEENPINASGVDAKAILSARLSKSRRLENLIAQLPGEKKNGLFGNLIALSLGLTPNFKSNFDLAEDAKLQLSKDTYDDDLDNLLAQIGDQYADLFLAAKNLSDAILLSDILRVNTEITKAPLSASMIKRYDEHHQDLTLLKALVRQQLPEKYKEIFFDQSKNGYAGYIDGGASQEEFYKFIKPILEKMDGTEELLVKLNREDLLRKQRTFDNGSIPHQIHLGELHAILRRQEDFYPFLKDNREKIEKILTFRIPYYVGPLARGNSRFAWMTRKSEETITPWNFEEVVDKGASAQSFIERMTNFDKNLPNEKVLPKHSLLYEYFTVYNELTKVKYVTEGMRKPAFLSGEQKKAIVDLLFKTNRKVTVKQLKEDYFKKIECFDSVEISGVEDRFNASLGTYHDLLKIIKDKDFLDNEENEDILEDIVLTLTLFEDREMIEERLKTYAHLFDDKVMKQLKRRRYTGWGRLSRKLINGIRDKQSGKTILDFLKSDGFANRNFMQLIHDDSLTFKEDIQKAQVSGQGDSLHEHIANLAGSPAIKKGILQTVKVVDELVKVMGRHKPENIVIEMARENQTTQKGQKNSRERMKRIEEGIKELGSQILKEHPVENTQLQNEKLYLYYLQNGRDMYVDQELDINRLSDYDVDHIVPQSFLKDDSIDNKVLTRSDKARGKSDNVPSEEVVKKMKNYWRQLLNAKLITQRKFDNLTKAERGGLSELDKAGFIKRQLVETRQITKHVAQILDSRMNTKYDENDKLIREVKVITLKSKLVSDFRKDFQFYKVREINNYHHAHDAYLNAVVGTALIKKYPKLESEFVYGDYKVYDVRKMIAKSEQEIGKATAKYFFYSNIMNFFKTEITLANGEIRKRPLIETNGETGEIVWDKGRDFATVRKVLSMPQVNIVKKTEVQTGGFSKESILPKRNSDKLIARKKDWDPKKYGGFDSPTVAYSVLVVAKVEKGKSKKLKSVKELLGITIMERSSFEKNPIDFLEAKGYKEVKKDLIIKLPKYSLFELENGRKRMLASAGELQKGNELALPSKYVNFLYLASHYEKLKGSPEDNEQKQLFVEQHKHYLDEIIEQISEFSKRVILADANLDKVLSAYNKHRDKPIREQAENIIHLFTLTNLGAPAAFKYFDTTIDRKRYTSTKEVLDATLIHQSITGLYETRIDLSQLGGDGGEAAAKGGGPAPGGMNPLQLLQPLPAEVKGTKLLAHWNSGATITCIPESFLEDEQPIKQTLIKTIHGEKQQNVYYLTFKVKGRKVEAEVIASPYEYILLSPTDVPWLTQQPLQLTILVPLQEYQDRILNKTALPEEQKQQLKALFTKYDNLWQHWENQVGHRKIRPHNIATGDYPPRPQKQYPINPKAKPSIQIVIDDLLKQGVLTPQNSTMNTPVYPVPKPDGRWRMVLDYREVNKTIPLTAAQNQHSAGILATIVRQKYKTTLDLANGFWAHPITPDSYWLTAFTWQGKQYCWTRLPQGFLNSPALFTADAVDLLKEVPNVQVYVDDIYLSHDNPHEHIQQLEKVFQILLQAGYVVSLKKSEIGQRTVEFLGFNITKEGRGLTDTFKTKLLNVTPPKDLKQLQSILGLLNFARNFIPNFAELVQTLYNLIASSKGKYIEWTEDNTKQLNKVIEALNTASNLEERLPDQRLVIKVNTSPSAGYVRYYNESGKKPIMYLNYVFSKAELKFSMLEKLLTTMHKALIKAMDLAMGQEILVYSPIVSMTKIQKTPLPERKALPIRWITWMTYLEDPRIQFHYDKTLPELKHIPDVYTSSIPPLKHPSQYEGVFCTDGSAIKSPDPTKSNNAGMGIVHAIYNPEYKILNQWSIPLGHHTAQMAEIAAVEFACKKALKVPGPVLVITDSFYVAESANKELPYWKSNGFVNNKKEPLKHISKWKSIAECLSIKPDITIQHEKGHQPINTSIHTEGNALADKLATQGSYVVNAGKRTADGSEFEKRTADGSEFESPKKKAKVE

SEQ ID NO: 7499 - protein, 2094 aa, synthetic construct
MPAAKRVKLDGGDKKYSIGLDIGTNSVGWAVITDEYKVPSKKFKVLGNTDRHSIKKNLIGALLFDSGETAEATRLKRTARRRYTRRKNRICYLQEIFSNEMAKVDDSFFHRLEESFLVEEDKKHERHPIFGNIVDEVAYHEKYPTIYHLRKKLVDSTDKADLRLIYLALAHMIKFRGHFLIEGDLNPDNSDVDKLFIQLVQTYNQLFEENPINASGVDAKAILSARLSKSRRLENLIAQLPGEKKNGLFGNLIALSLGLTPNFKSNFDLAEDAKLQLSKDTYDDDLDNLLAQIGDQYADLFLAAKNLSDAILLSDILRVNTEITKAPLSASMIKRYDEHHQDLTLLKALVRQQLPEKYKEIFFDQSKNGYAGYIDGGASQEEFYKFIKPILEKMDGTEELLVKLNREDLLRKQRTFDNGSIPHQIHLGELHAILRRQEDFYPFLKDNREKIEKILTFRIPYYVGPLARGNSRFAWMTRKSEETITPWNFEEVVDKGASAQSFIERMTNFDKNLPNEKVLPKHSLLYEYFTVYNELTKVKYVTEGMRKPAFLSGEQKKAIVDLLFKTNRKVTVKQLKEDYFKKIECFDSVEISGVEDRFNASLGTYHDLLKIIKDKDFLDNEENEDILEDIVLTLTLFEDREMIEERLKTYAHLFDDKVMKQLKRRRYTGWGRLSRKLINGIRDKQSGKTILDFLKSDGFANRNFMQLIHDDSLTFKEDIQKAQVSGQGDSLHEHIANLAGSPAIKKGILQTVKVVDELVKVMGRHKPENIVIEMARENQTTQKGQKNSRERMKRIEEGIKELGSQILKEHPVENTQLQNEKLYLYYLQNGRDMYVDQELDINRLSDYDVDHIVPQSFLKDDSIDNKVLTRSDKARGKSDNVPSEEVVKKMKNYWRQLLNAKLITQRKFDNLTKAERGGLSELDKAGFIKRQLVETRQITKHVAQILDSRMNTKYDENDKLIREVKVITLKSKLVSDFRKDFQFYKVREINNYHHAHDAYLNAVVGTALIKKYPKLESEFVYGDYKVYDVRKMIAKSEQEIGKATAKYFFYSNIMNFFKTEITLANGEIRKRPLIETNGETGEIVWDKGRDFATVRKVLSMPQVNIVKKTEVQTGGFSKESILPKRNSDKLIARKKDWDPKKYGGFDSPTVAYSVLVVAKVEKGKSKKLKSVKELLGITIMERSSFEKNPIDFLEAKGYKEVKKDLIIKLPKYSLFELENGRKRMLASAGELQKGNELALPSKYVNFLYLASHYEKLKGSPEDNEQKQLFVEQHKHYLDEIIEQISEFSKRVILADANLDKVLSAYNKHRDKPIREQAENIIHLFTLTNLGAPAAFKYFDTTIDRKRYTSTKEVLDATLIHQSITGLYETRIDLSQLGGDGGEAAAKGGGPAPGGVLNLEEEYRLHEKPVPSSIDPSWLQLFPTVWAERAGMGLANQVPPVVVELRSGASPVAVRQYPMSKEAREGIRPHIQRFLDLGVLVPCQSPWNTPLLPVKKPGTNDYRPVQDLREINKRVQDIHPTVPNPYNLLSSLPPSHTWYSVLDLKDAFFCLKLHPNSQPLFAFEWRDPEKGNTGQLTWTRLPQGFKNSPTLFNEALHRDLAPFRALNPQVVLLQYVDDLLVAAPTYRDCKEGTQKLLQELSKLGYRVSAKKAQLCQKEVTYLGYLLKEGKRWLTPARKATVMKIPPPTTPRQVREFLGKAGFCRLFIPGFASLAAPLYPLTKPSIPFIWTEEHQKAFDRIKEALLSAPALALPDLTKPFTLYVDERAGVARGVLTQTLGPWRRPVAYLSKKLDPVASGWPTCLKAVAAVALLLKDADKLTLGQNVTVIASHSLESIVRQPPDRWMTNARMTHYQSLLLNERVSFAPPAVLNPATLLPVESEATPVHRCSEILAEETGTRRDLKDQPLPGVPAWYTDGSSFIAEGKRRAGAAIVDGKRTVWASSLPEGTSAQKAELVALTQALRLAEGKDINIYTDSRYAFATAHIHGAIYKQRGWLTSAGKDIKNKEEILALLEAIHLPKRVAIIHCPGHQKGNDPVATGNRRADEAAKQAALSTRVLAETTKPAGKRTADGSEFEKRTADGSEFESPKKKAKVE

SEQ ID NO: 7500 - protein, 2098 aa, synthetic construct
MPAAKRVKLDGGDKKYSIGLDIGTNSVGWAVITDEYKVPSKKFKVLGNTDRHSIKKNLIGALLFDSGETAEATRLKRTARRRYTRRKNRICYLQEIFSNEMAKVDDSFFHRLEESFLVEEDKKHERHPIFGNIVDEVAYHEKYPTIYHLRKKLVDSTDKADLRLIYLALAHMIKFRGHFLIEGDLNPDNSDVDKLFIQLVQTYNQLFEENPINASGVDAKAILSARLSKSRRLENLIAQLPGEKKNGLFGNLIALSLGLTPNFKSNFDLAEDAKLQLSKDTYDDDLDNLLAQIGDQYADLFLAAKNLSDAILLSDILRVNTEITKAPLSASMIKRYDEHHQDLTLLKALVRQQLPEKYKEIFFDQSKNGYAGYIDGGASQEEFYKFIKPILEKMDGTEELLVKLNREDLLRKQRTFDNGSIPHQIHLGELHAILRRQEDFYPFLKDNREKIEKILTFRIPYYVGPLARGNSRFAWMTRKSEETITPWNFEEVVDKGASAQSFIERMTNFDKNLPNEKVLPKHSLLYEYFTVYNELTKVKYVTEGMRKPAFLSGEQKKAIVDLLFKTNRKVTVKQLKEDYFKKIECFDSVEISGVEDRFNASLGTYHDLLKIIKDKDFLDNEENEDILEDIVLTLTLFEDREMIEERLKTYAHLFDDKVMKQLKRRRYTGWGRLSRKLINGIRDKQSGKTILDFLKSDGFANRNFMQLIHDDSLTFKEDIQKAQVSGQGDSLHEHIANLAGSPAIKKGILQTVKVVDELVKVMGRHKPENIVIEMARENQTTQKGQKNSRERMKRIEEGIKELGSQILKEHPVENTQLQNEKLYLYYLQNGRDMYVDQELDINRLSDYDVDHIVPQSFLKDDSIDNKVLTRSDKARGKSDNVPSEEVVKKMKNYWRQLLNAKLITQRKFDNLTKAERGGLSELDKAGFIKRQLVETRQITKHVAQILDSRMNTKYDENDKLIREVKVITLKSKLVSDFRKDFQFYKVREINNYHHAHDAYLNAVVGTALIKKYPKLESEFVYGDYKVYDVRKMIAKSEQEIGKATAKYFFYSNIMNFFKTEITLANGEIRKRPLIETNGETGEIVWDKGRDFATVRKVLSMPQVNIVKKTEVQTGGFSKESILPKRNSDKLIARKKDWDPKKYGGFDSPTVAYSVLVVAKVEKGKSKKLKSVKELLGITIMERSSFEKNPIDFLEAKGYKEVKKDLIIKLPKYSLFELENGRKRMLASAGELQKGNELALPSKYVNFLYLASHYEKLKGSPEDNEQKQLFVEQHKHYLDEIIEQISEFSKRVILADANLDKVLSAYNKHRDKPIREQAENIIHLFTLTNLGAPAAFKYFDTTIDRKRYTSTKEVLDATLIHQSITGLYETRIDLSQLGGDGGEAAAKPAPGGGGGTAPLEEEYRLFLEAPIQNVTLLEQWKREIPKVWAEINPPGLASTQAPIHVQLLSTALPVRVRQYPITLEAKRSLRETIRKFRAAGILRPVHSPWNTPLLPVRKSGTSEYRMVQDLREVNKRVETIHPTVPNPYTLLSLLPPDRIWYSVLDLKDAFFCIPLAPESQLIFAFEWADAEEGESGQLTWTRLPQGFKNSPTLFNEALNRDLQGFRLDHPSVSLLQYVDDLLIAADTQAACLSATRDLLMTLAELGYRVSGKKAQLCQEEVTYLGFKIHKGSRSLSNSRTQAILQIPVPKTKRQVREFLGKIGYCRLFIPGFAELAQPLYAATRPGNDPLVWGEKEEEAFQSLKLALTQPPALALPSLDKPFQLFVEETSGAAKGVLTQALGPWKRPVAYLSKRLDPVAAGWPRCLRAIAAAALLTREASKLTFGQDIEITSSHNLESLLRSPPDKWLTNARITQYQVLLLDPPRVRFKQTAALNPATLLPETDDTLPIHHCLDTLDSLTSTRPDLTDQPLAQAEATLFTDGSSYIRDGKRYAGAAVVTLDSVIWAEPLPIGTSAQKAELIALTKALEWSKDKSVNIYTDSRYAFATLHVHGMIYRERGWLTAGGKAIKNAPEILALLTAVWLPKRVAVMHCKGHQKDDAPTSTGNRRADEVAREVAIRPLSTQATISAGKRTADGSEFEKRTADGSEFESPKKKAKVE

SEQ ID NO: 7501 - protein, 2102 aa, synthetic construct
MPAAKRVKLDGGDKKYSIGLDIGTNSVGWAVITDEYKVPSKKFKVLGNTDRHSIKKNLIGALLFDSGETAEATRLKRTARRRYTRRKNRICYLQEIFSNEMAKVDDSFFHRLEESFLVEEDKKHERHPIFGNIVDEVAYHEKYPTIYHLRKKLVDSTDKADLRLIYLALAHMIKFRGHFLIEGDLNPDNSDVDKLFIQLVQTYNQLFEENPINASGVDAKAILSARLSKSRRLENLIAQLPGEKKNGLFGNLIALSLGLTPNFKSNFDLAEDAKLQLSKDTYDDDLDNLLAQIGDQYADLFLAAKNLSDAILLSDILRVNTEITKAPLSASMIKRYDEHHQDLTLLKALVRQQLPEKYKEIFFDQSKNGYAGYIDGGASQEEFYKFIKPILEKMDGTEELLVKLNREDLLRKQRTFDNGSIPHQIHLGELHAILRRQEDFYPFLKDNREKIEKILTFRIPYYVGPLARGNSRFAWMTRKSEETITPWNFEEVVDKGASAQSFIERMTNFDKNLPNEKVLPKHSLLYEYFTVYNELTKVKYVTEGMRKPAFLSGEQKKAIVDLLFKTNRKVTVKQLKEDYFKKIECFDSVEISGVEDRFNASLGTYHDLLKIIKDKDFLDNEENEDILEDIVLTLTLFEDREMIEERLKTYAHLFDDKVMKQLKRRRYTGWGRLSRKLINGIRDKQSGKTILDFLKSDGFANRNFMQLIHDDSLTFKEDIQKAQVSGQGDSLHEHIANLAGSPAIKKGILQTVKVVDELVKVMGRHKPENIVIEMARENQTTQKGQKNSRERMKRIEEGIKELGSQILKEHPVENTQLQNEKLYLYYLQNGRDMYVDQELDINRLSDYDVDHIVPQSFLKDDSIDNKVLTRSDKARGKSDNVPSEEVVKKMKNYWRQLLNAKLITQRKFDNLTKAERGGLSELDKAGFIKRQLVETRQITKHVAQILDSRMNTKYDENDKLIREVKVITLKSKLVSDFRKDFQFYKVREINNYHHAHDAYLNAVVGTALIKKYPKLESEFVYGDYKVYDVRKMIAKSEQEIGKATAKYFFYSNIMNFFKTEITLANGEIRKRPLIETNGETGEIVWDKGRDFATVRKVLSMPQVNIVKKTEVQTGGFSKESILPKRNSDKLIARKKDWDPKKYGGFDSPTVAYSVLVVAKVEKGKSKKLKSVKELLGITIMERSSFEKNPIDFLEAKGYKEVKKDLIIKLPKYSLFELENGRKRMLASAGELQKGNELALPSKYVNFLYLASHYEKLKGSPEDNEQKQLFVEQHKHYLDEIIEQISEFSKRVILADANLDKVLSAYNKHRDKPIREQAENIIHLFTLTNLGAPAAFKYFDTTIDRKRYTSTKEVLDATLIHQSITGLYETRIDLSQLGGDGGEAAAKPAPGGGGGTVSLQDEHRLFDIPVTTSLPDVWLQDFPQAWAETGGLGRAKCQAPIIIDLKPTAVPVSIKQYPMSLEAHMGIRQHIIKFLELGVLRPCRSPWNTPLLPVKKPGTQDYRPVQDLREINKRTVDIHPTVPNPYNLLSTLKPDYSWYTVLDLKDAFFCLPLAPQSQELFAFEWKDPERGISGQLTWTRLPQGFKNSPTLFNEALHRDLTDFRTQHPEVTLLQYVDDLLLAAPTKKACTQGTRHLLQELGEKGYRASAKKAQICQTKVTYLGYILSEGKRWLTPGRIETVARIPPPRNPREVREFLGKAGFCRLFIPGFAELAAPLYALTKPSTPFTWQTEHQLAFEALKKALLSAPALGLPDTSKPFTLFLDERQGIAKGVLTQKLGPWKRPVAYLSKKLDPVAAGWPPCLRIMAATAMLVKDSAKLTLGQPLTVITPHTLEAIVRQPPDRWITNARLTHYQALLLDTDRVQFGPPVTLNPATLLPVPENQPSPHDCRQVLAETHGTREDLKDQELPDADHTWYTDGSSYLDSGTRRAGAAVVDGHNTIWAQSLPPGTSAQKAELIALTKALELSKGKKANIYTDSRYAFATAHTHGSIYERRGWLTSEGKEIKNKAEIIALLKALFLPQEVAIIHCPGHQKGQDPVAVGNRQADRVARQAAMAEVLTLATEPDNTSHITAGKRTADGSEFEKRTADGSEFESPKKKAKVE

SEQ ID NO: 7502 - protein, 2095 aa, synthetic construct
MPAAKRVKLDGGDKKYSIGLDIGTNSVGWAVITDEYKVPSKKFKVLGNTDRHSIKKNLIGALLFDSGETAEATRLKRTARRRYTRRKNRICYLQEIFSNEMAKVDDSFFHRLEESFLVEEDKKHERHPIFGNIVDEVAYHEKYPTIYHLRKKLVDSTDKADLRLIYLALAHMIKFRGHFLIEGDLNPDNSDVDKLFIQLVQTYNQLFEENPINASGVDAKAILSARLSKSRRLENLIAQLPGEKKNGLFGNLIALSLGLTPNFKSNFDLAEDAKLQLSKDTYDDDLDNLLAQIGDQYADLFLAAKNLSDAILLSDILRVNTEITKAPLSASMIKRYDEHHQDLTLLKALVRQQLPEKYKEIFFDQSKNGYAGYIDGGASQEEFYKFIKPILEKMDGTEELLVKLNREDLLRKQRTFDNGSIPHQIHLGELHAILRRQEDFYPFLKDNREKIEKILTFRIPYYVGPLARGNSRFAWMTRKSEETITPWNFEEVVDKGASAQSFIERMTNFDKNLPNEKVLPKHSLLYEYFTVYNELTKVKYVTEGMRKPAFLSGEQKKAIVDLLFKTNRKVTVKQLKEDYFKKIECFDSVEISGVEDRFNASLGTYHDLLKIIKDKDFLDNEENEDILEDIVLTLTLFEDREMIEERLKTYAHLFDDKVMKQLKRRRYTGWGRLSRKLINGIRDKQSGKTILDFLKSDGFANRNFMQLIHDDSLTFKEDIQKAQVSGQGDSLHEHIANLAGSPAIKKGILQTVKVVDELVKVMGRHKPENIVIEMARENQTTQKGQKNSRERMKRIEEGIKELGSQILKEHPVENTQLQNEKLYLYYLQNGRDMYVDQELDINRLSDYDVDHIVPQSFLKDDSIDNKVLTRSDKARGKSDNVPSEEVVKKMKNYWRQLLNAKLITQRKFDNLTKAERGGLSELDKAGFIKRQLVETRQITKHVAQILDSRMNTKYDENDKLIREVKVITLKSKLVSDFRKDFQFYKVREINNYHHAHDAYLNAVVGTALIKKYPKLESEFVYGDYKVYDVRKMIAKSEQEIGKATAKYFFYSNIMNFFKTEITLANGEIRKRPLIETNGETGEIVWDKGRDFATVRKVLSMPQVNIVKKTEVQTGGFSKESILPKRNSDKLIARKKDWDPKKYGGFDSPTVAYSVLVVAKVEKGKSKKLKSVKELLGITIMERSSFEKNPIDFLEAKGYKEVKKDLIIKLPKYSLFELENGRKRMLASAGELQKGNELALPSKYVNFLYLASHYEKLKGSPEDNEQKQLFVEQHKHYLDEIIEQISEFSKRVILADANLDKVLSAYNKHRDKPIREQAENIIHLFTLTNLGAPAAFKYFDTTIDRKRYTSTKEVLDATLIHQSITGLYETRIDLSQLGGDGGEAAAKPAPGGGGGTLQLEEEYRLFEPESTQKQEMDIWLKNFPQAWAETGGMGTAHCQAPVLIQLKATATPISIRQYPMPHEAYQGIKPHIRRMLDQGILKPCQSPWNTPLLPVKKPGTEDYRPVQDLREVNKRVEDIHPTVPNPYNLLSTLPPSHPWYTVLDLKDAFFCLRLHSESQLLFAFEWRDPEIGLSGQLTWTRLPQGFKNSPTLFNEALHSDLADFRVRYPALVLLQYVDDLLLAAATRTECLEGTKALLETLGNKGYRASAKKAQICLQEVTYLGYSLKDGQRWLTKARKEAILSIPVPKNSRQVREFLGKAGYCRLFIPGFAELAAPLYPLTRPGTLFQWGTEQQLAFEDIKKALLSSPALGLPDITKPFELFIDENSGFAKGVLVQKLGPWKRPVAYLSKKLDTVASGWPPCLRMVAAIAILVKDAGKLTLGQPLTILTSHPVEALVRQPPNKWLSNARMTHYQAMLLDAERVHFGPTVSLNPATLLPLPSGGNHHDCLQILAETHGTRPDLTDQPLPDADLTWYTDGSSFIRNGEREAGAAVTTESEVIWAAPLPPGTSAQRAELIALTQALKMAEGKKLTVYTDSRYAFATTHVHGEIYRRRGWLTSEGKEIKNKNEILALLEALFLPKRLSIIHCPGHQKGDSPQAKGNRLADDTAKKAATETHSSLTVLPAGKRTADGSEFEKRTADGSEFESPKKKAKVE

SEQ ID NO: 7503 - protein, 2176 aa, synthetic construct
MPAAKRVKLDGGDKKYSIGLDIGTNSVGWAVITDEYKVPSKKFKVLGNTDRHSIKKNLIGALLFDSGETAEATRLKRTARRRYTRRKNRICYLQEIFSNEMAKVDDSFFHRLEESFLVEEDKKHERHPIFGNIVDEVAYHEKYPTIYHLRKKLVDSTDKADLRLIYLALAHMIKFRGHFLIEGDLNPDNSDVDKLFIQLVQTYNQLFEENPINASGVDAKAILSARLSKSRRLENLIAQLPGEKKNGLFGNLIALSLGLTPNFKSNFDLAEDAKLQLSKDTYDDDLDNLLAQIGDQYADLFLAAKNLSDAILLSDILRVNTEITKAPLSASMIKRYDEHHQDLTLLKALVRQQLPEKYKEIFFDQSKNGYAGYIDGGASQEEFYKFIKPILEKMDGTEELLVKLNREDLLRKQRTFDNGSIPHQIHLGELHAILRRQEDFYPFLKDNREKIEKILTFRIPYYVGPLARGNSRFAWMTRKSEETITPWNFEEVVDKGASAQSFIERMTNFDKNLPNEKVLPKHSLLYEYFTVYNELTKVKYVTEGMRKPAFLSGEQKKAIVDLLFKTNRKVTVKQLKEDYFKKIECFDSVEISGVEDRFNASLGTYHDLLKIIKDKDFLDNEENEDILEDIVLTLTLFEDREMIEERLKTYAHLFDDKVMKQLKRRRYTGWGRLSRKLINGIRDKQSGKTILDFLKSDGFANRNFMQLIHDDSLTFKEDIQKAQVSGQGDSLHEHIANLAGSPAIKKGILQTVKVVDELVKVMGRHKPENIVIEMARENQTTQKGQKNSRERMKRIEEGIKELGSQILKEHPVENTQLQNEKLYLYYLQNGRDMYVDQELDINRLSDYDVDHIVPQSFLKDDSIDNKVLTRSDKARGKSDNVPSEEVVKKMKNYWRQLLNAKLITQRKFDNLTKAERGGLSELDKAGFIKRQLVETRQITKHVAQILDSRMNTKYDENDKLIREVKVITLKSKLVSDFRKDFQFYKVREINNYHHAHDAYLNAVVGTALIKKYPKLESEFVYGDYKVYDVRKMIAKSEQEIGKATAKYFFYSNIMNFFKTEITLANGEIRKRPLIETNGETGEIVWDKGRDFATVRKVLSMPQVNIVKKTEVQTGGFSKESILPKRNSDKLIARKKDWDPKKYGGFDSPTVAYSVLVVAKVEKGKSKKLKSVKELLGITIMERSSFEKNPIDFLEAKGYKEVKKDLIIKLPKYSLFELENGRKRMLASAGELQKGNELALPSKYVNFLYLASHYEKLKGSPEDNEQKQLFVEQHKHYLDEIIEQISEFSKRVILADANLDKVLSAYNKHRDKPIREQAENIIHLFTLTNLGAPAAFKYFDTTIDRKRYTSTKEVLDATLIHQSITGLYETRIDLSQLGGDGGEAAAKPAPGGGGGMNPLQLLQPLPAEIKGTKLLAHWNSGATITCIPESFLEDEQPIKKTLIKTIHGEKQQNVYYVTFKVKGRKVEAEVIASPYEYILLSPTDVPWLTQQPLQLTILVPLQEYQEKILSKTALPEDQKQQLKTLFVKYDNLWQHWENQVGHRKIRPHNIATGDYPPRPQKQYPINPKAKPSIQIVIDDLLKQGVLTPQNSTMNTPVYPVPKPDGRWRMVLDYREVNKTIPLTAAQNQHSAGILATIVRQKYKTTLDLANGFWAHPITPESYWLTAFTWQGKQYCWTRLPQGFLNSPALFNADVVDLLKEIPNVQVYVDDIYLSHDDPKEHVQQLEKVFQILLQAGYVVSLKKSEIGQKTVEFLGFNITKEGRGLTDTFKTKLLNITPPKDLKQLQSILGLLNFARNFIPNFAELVQPLYNLIAPAKGKYIEWSEENTKQLNMVIEALNTASNLEERLPEQRLVIKVNTSPSAGYVRYYNETGKKPIMYLNYVFSKAELKFSMLEKLLTTMHKALIKAMDLAMGQEILVYSPIVSMTKIQKTPLPERKALPIRWITWMTYLEDPRIQFHYDKTLPELKHIPDVYTSSQSPVKHPSQYEGVFYTDGSAIKSPDPTKSNNAGMGIVHATYKPEYQVLNQWSIPLGNHTAQMAEIAAVEFACKKALKIPGPVLVITDSFYVAESANKELPYWKSNGFVNNKKKPLKHISKWKSIAECLSMKPDITIQHEKGISLQIPVFILKGNALADKLATQGSYVVNAGKRTADGSEFEKRTADGSEFESPKKKAKVE

SEQ ID NO: 7504 - protein, 2094 aa, synthetic construct
MPAAKRVKLDGGDKKYSIGLDIGTNSVGWAVITDEYKVPSKKFKVLGNTDRHSIKKNLIGALLFDSGETAEATRLKRTARRRYTRRKNRICYLQEIFSNEMAKVDDSFFHRLEESFLVEEDKKHERHPIFGNIVDEVAYHEKYPTIYHLRKKLVDSTDKADLRLIYLALAHMIKFRGHFLIEGDLNPDNSDVDKLFIQLVQTYNQLFEENPINASGVDAKAILSARLSKSRRLENLIAQLPGEKKNGLFGNLIALSLGLTPNFKSNFDLAEDAKLQLSKDTYDDDLDNLLAQIGDQYADLFLAAKNLSDAILLSDILRVNTEITKAPLSASMIKRYDEHHQDLTLLKALVRQQLPEKYKEIFFDQSKNGYAGYIDGGASQEEFYKFIKPILEKMDGTEELLVKLNREDLLRKQRTFDNGSIPHQIHLGELHAILRRQEDFYPFLKDNREKIEKILTFRIPYYVGPLARGNSRFAWMTRKSEETITPWNFEEVVDKGASAQSFIERMTNFDKNLPNEKVLPKHSLLYEYFTVYNELTKVKYVTEGMRKPAFLSGEQKKAIVDLLFKTNRKVTVKQLKEDYFKKIECFDSVEISGVEDRFNASLGTYHDLLKIIKDKDFLDNEENEDILEDIVLTLTLFEDREMIEERLKTYAHLFDDKVMKQLKRRRYTGWGRLSRKLINGIRDKQSGKTILDFLKSDGFANRNFMQLIHDDSLTFKEDIQKAQVSGQGDSLHEHIANLAGSPAIKKGILQTVKVVDELVKVMGRHKPENIVIEMARENQTTQKGQKNSRERMKRIEEGIKELGSQILKEHPVENTQLQNEKLYLYYLQNGRDMYVDQELDINRLSDYDVDHIVPQSFLKDDSIDNKVLTRSDKARGKSDNVPSEEVVKKMKNYWRQLLNAKLITQRKFDNLTKAERGGLSELDKAGFIKRQLVETRQITKHVAQILDSRMNTKYDENDKLIREVKVITLKSKLVSDFRKDFQFYKVREINNYHHAHDAYLNAVVGTALIKKYPKLESEFVYGDYKVYDVRKMIAKSEQEIGKATAKYFFYSNIMNFFKTEITLANGEIRKRPLIETNGETGEIVWDKGRDFATVRKVLSMPQVNIVKKTEVQTGGFSKESILPKRNSDKLIARKKDWDPKKYGGFDSPTVAYSVLVVAKVEKGKSKKLKSVKELLGITIMERSSFEKNPIDFLEAKGYKEVKKDLIIKLPKYSLFELENGRKRMLASAGELQKGNELALPSKYVNFLYLASHYEKLKGSPEDNEQKQLFVEQHKHYLDEIIEQISEFSKRVILADANLDKVLSAYNKHRDKPIREQAENIIHLFTLTNLGAPAAFKYFDTTIDRKRYTSTKEVLDATLIHQSITGLYETRIDLSQLGGDGGEAAAKPAPGGGGGVLNLEEEYRLHEKPVPSSIDPSWLQLFPTVWAERAGMGLANQVPPVVVELRSGASPVAVRQYPMSKEAREGIRPHIQKFLDLGVLVPCRSPWNTPLLPVKKPGTNDYRPVQDLREINKRVQDIHPTVPNPYNLLSSLPPSYTWYSVLDLKDAFFCLRLHPNSQPLFAFEWKDPEKGNTGQLTWTRLPQGFKNSPTLFNEALHRDLAPFRALNPQVVLLQYVDDLLVAAPTYEDCKKGTQKLLQELSKLGYRVSAKKAQLCQREVTYLGYLLKEGKRWLTPARKATVMKIPVPTTPRQVREFLGKAGFCRLFIPGFASLAAPLYPLTKPSIPFIWTEEHQQAFDHIKKALLSAPALALPDLTKPFTLYIDERAGVARGVLTQTLGPWRRPVAYLSKKLDPVASGWPTCLKAVAAVALLLKDADKLTLGQNVTVIASHSLESIVRQPPDRWMTNARMTHYQSLLLNERVSFAPPAVLNPATLLPVESEATPVHRCSEILAEETGTRRDLEDQPLPGVPTWYTDGSSFITEGKRRAGAPIVDGKRTVWASSLPEGTSAQKAELVALTQALRLAEGKNINIYTDSRYAFATAHIHGAIYKQRGWLTSAGKDIKNKEEILALLEAIHLPRRVAIIHCPGHQRGSNPVATGNRRADEAAKQAALSTRVLAGTTKPAGKRTADGSEFEKRTADGSEFESPKKKAKVE

SEQ ID NO: 7505 - protein, 2218 aa, synthetic construct
MPAAKRVKLDGGDKKYSIGLDIGTNSVGWAVITDEYKVPSKKFKVLGNTDRHSIKKNLIGALLFDSGETAEATRLKRTARRRYTRRKNRICYLQEIFSNEMAKVDDSFFHRLEESFLVEEDKKHERHPIFGNIVDEVAYHEKYPTIYHLRKKLVDSTDKADLRLIYLALAHMIKFRGHFLIEGDLNPDNSDVDKLFIQLVQTYNQLFEENPINASGVDAKAILSARLSKSRRLENLIAQLPGEKKNGLFGNLIALSLGLTPNFKSNFDLAEDAKLQLSKDTYDDDLDNLLAQIGDQYADLFLAAKNLSDAILLSDILRVNTEITKAPLSASMIKRYDEHHQDLTLLKALVRQQLPEKYKEIFFDQSKNGYAGYIDGGASQEEFYKFIKPILEKMDGTEELLVKLNREDLLRKQRTFDNGSIPHQIHLGELHAILRRQEDFYPFLKDNREKIEKILTFRIPYYVGPLARGNSRFAWMTRKSEETITPWNFEEVVDKGASAQSFIERMTNFDKNLPNEKVLPKHSLLYEYFTVYNELTKVKYVTEGMRKPAFLSGEQKKAIVDLLFKTNRKVTVKQLKEDYFKKIECFDSVEISGVEDRFNASLGTYHDLLKIIKDKDFLDNEENEDILEDIVLTLTLFEDREMIEERLKTYAHLFDDKVMKQLKRRRYTGWGRLSRKLINGIRDKQSGKTILDFLKSDGFANRNFMQLIHDDSLTFKEDIQKAQVSGQGDSLHEHIANLAGSPAIKKGILQTVKVVDELVKVMGRHKPENIVIEMARENQTTQKGQKNSRERMKRIEEGIKELGSQILKEHPVENTQLQNEKLYLYYLQNGRDMYVDQELDINRLSDYDVDHIVPQSFLKDDSIDNKVLTRSDKARGKSDNVPSEEVVKKMKNYWRQLLNAKLITQRKFDNLTKAERGGLSELDKAGFIKRQLVETRQITKHVAQILDSRMNTKYDENDKLIREVKVITLKSKLVSDFRKDFQFYKVREINNYHHAHDAYLNAVVGTALIKKYPKLESEFVYGDYKVYDVRKMIAKSEQEIGKATAKYFFYSNIMNFFKTEITLANGEIRKRPLIETNGETGEIVWDKGRDFATVRKVLSMPQVNIVKKTEVQTGGFSKESILPKRNSDKLIARKKDWDPKKYGGFDSPTVAYSVLVVAKVEKGKSKKLKSVKELLGITIMERSSFEKNPIDFLEAKGYKEVKKDLIIKLPKYSLFELENGRKRMLASAGELQKGNELALPSKYVNFLYLASHYEKLKGSPEDNEQKQLFVEQHKHYLDEIIEQISEFSKRVILADANLDKVLSAYNKHRDKPIREQAENIIHLFTLTNLGAPAAFKYFDTTIDRKRYTSTKEVLDATLIHQSITGLYETRIDLSQLGGDGGEAAAKPAPGGGGGTLGDQGSRGSDPLPEPRVTLTVEGIPTEFLVNTGAEHSVLTKPMGKMGSKRTVVAGATGSKVYPWTTKRLLKIGQKQVTHSFLVIPECPAPLLGRDLLTKLKAQIQFSTEGPQVTWEDRPAMCLVLNLEEEYRLHEKPVPPSIDPSWLQLFPMVWAEKAGMGLANQVPPVVVELKSDASPVAVRQYPMSKEAREGIRPHIQRFLDLGILVPCQSPWNTPLLPVKKPGTNDYRPVQDLREVNKRVQDIHPTVPNPYNLLSSLPPSHTWYSVLDLKDAFFCLKLHPNSQPLFAFEWRDPEKGNTGQLTWTRLPQGFKNSPTLFNEALHRDLASFRALNPQVVMLQYVDDLLVAAPTYRDCKEGTRRLLQELSKLGYRVSAKKAQLCREEVTYLGYLLKGGKRWLTPARKATVMKIPTPTTPRQVREFLGKAGFCRLFIPGFASLAAPLYPLTRPKVPFTWTEAHQEAFGRIKEALLSAPALALPDLTKPFALYVDEKEGVARGVLTQTLGPWRRPVAYLSKKLDPVASGWPTCLKAIAAVALLLKDADKLTLGQNVLVIAPHNLESIVRQPPDRWMTNARMTHYQSLLLNERVSFAPPAILNPATLLPVESDDTPIHICSEILAEETGTRPDLRDQPLPGVPAWYTDGSSFIMDGRRQAGAAIVDNKRTVWASNLPEGTSAQKAELIALTQALRLAEGKSINIYTDSRYAFATAHVHGAIYKQRGWLTSAGKDIKNKEEILALLEAIHLPKRVAIIHCPGHQRGTDPVATGNRKADEAAKQAAQSTRILTETTKNAGKRTADGSEFEKRTADGSEFESPKKKAKVE

SEQ ID NO: 7506 - protein, 2096 aa, synthetic construct
MPAAKRVKLDGGDKKYSIGLDIGTNSVGWAVITDEYKVPSKKFKVLGNTDRHSIKKNLIGALLFDSGETAEATRLKRTARRRYTRRKNRICYLQEIFSNEMAKVDDSFFHRLEESFLVEEDKKHERHPIFGNIVDEVAYHEKYPTIYHLRKKLVDSTDKADLRLIYLALAHMIKFRGHFLIEGDLNPDNSDVDKLFIQLVQTYNQLFEENPINASGVDAKAILSARLSKSRRLENLIAQLPGEKKNGLFGNLIALSLGLTPNFKSNFDLAEDAKLQLSKDTYDDDLDNLLAQIGDQYADLFLAAKNLSDAILLSDILRVNTEITKAPLSASMIKRYDEHHQDLTLLKALVRQQLPEKYKEIFFDQSKNGYAGYIDGGASQEEFYKFIKPILEKMDGTEELLVKLNREDLLRKQRTFDNGSIPHQIHLGELHAILRRQEDFYPFLKDNREKIEKILTFRIPYYVGPLARGNSRFAWMTRKSEETITPWNFEEVVDKGASAQSFIERMTNFDKNLPNEKVLPKHSLLYEYFTVYNELTKVKYVTEGMRKPAFLSGEQKKAIVDLLFKTNRKVTVKQLKEDYFKKIECFDSVEISGVEDRFNASLGTYHDLLKIIKDKDFLDNEENEDILEDIVLTLTLFEDREMIEERLKTYAHLFDDKVMKQLKRRRYTGWGRLSRKLINGIRDKQSGKTILDFLKSDGFANRNFMQLIHDDSLTFKEDIQKAQVSGQGDSLHEHIANLAGSPAIKKGILQTVKVVDELVKVMGRHKPENIVIEMARENQTTQKGQKNSRERMKRIEEGIKELGSQILKEHPVENTQLQNEKLYLYYLQNGRDMYVDQELDINRLSDYDVDHIVPQSFLKDDSIDNKVLTRSDKARGKSDNVPSEEVVKKMKNYWRQLLNAKLITQRKFDNLTKAERGGLSELDKAGFIKRQLVETRQITKHVAQILDSRMNTKYDENDKLIREVKVITLKSKLVSDFRKDFQFYKVREINNYHHAHDAYLNAVVGTALIKKYPKLESEFVYGDYKVYDVRKMIAKSEQEIGKATAKYFFYSNIMNFFKTEITLANGEIRKRPLIETNGETGEIVWDKGRDFATVRKVLSMPQVNIVKKTEVQTGGFSKESILPKRNSDKLIARKKDWDPKKYGGFDSPTVAYSVLVVAKVEKGKSKKLKSVKELLGITIMERSSFEKNPIDFLEAKGYKEVKKDLIIKLPKYSLFELENGRKRMLASAGELQKGNELALPSKYVNFLYLASHYEKLKGSPEDNEQKQLFVEQHKHYLDEIIEQISEFSKRVILADANLDKVLSAYNKHRDKPIREQAENIIHLFTLTNLGAPAAFKYFDTTIDRKRYTSTKEVLDATLIHQSITGLYETRIDLSQLGGDGGEAAAKPAPGGGGGTLNLEDEYRLYETSAEPEVSPGSTWLSDFPQAWAETGGMGLAVRQAPLIIPLKATSTPVSIKQYPMSQEAKLGIKPHIQRLLDQGILVPCQSPWNTPLLPVKKPGTNDYRPVQDLREVNKRVEDIHPTVPNPYNLLSGLPPSHRWYTVLDLKDAFFCLRLHPTSQPLFAFEWRDPGMGISGQLTWTRLPQGFKNSPTLFDEALHRDLADFRIQHPDLILLQYVDDILLAATSELDCQQGTRALLLTLGNLGYRASAKKAQLCQKQVKYLGYLLKEGQRWLTEARKETVMGQPTPKTPRQLREFLGTAGFCRLWIPGFAEMAAPLYPLTKTGTLFNWGPDQQKAYQEIKQALLTAPALGLPDLTKPFELFVDEKQGYAKGVLTQKLGPWRRPVAYLSKKLDPVAAGWPPCLRMVAAIAVLRKDAGKLTMGQPLVILAPHAVEALVKQPPDRWLSNARMTHYQAMLLDTDRVQFGPVVALNPATLLPLPEEGAPHDCLEILAETHGTRPDLTDQPIPDADHTWYTDGSSFLQEGQRKAGAAVTTETEVIWARALPAGTSAQRAELIALTQALKMAEGKRLNVYTDSRYAFATAHIHGEIYRRRGLLTSEGREIKNKSEILALLKALFLPKRLSIIHCLGHQKGDSAEARGNRLADQAAREAAIKTPPDTSTLLAGKRTADGSEFEKRTADGSEFESPKKKAKVE

SEQ ID NO: 7507 - protein, 2096 aa, synthetic construct
MPAAKRVKLDGGDKKYSIGLDIGTNSVGWAVITDEYKVPSKKFKVLGNTDRHSIKKNLIGALLFDSGETAEATRLKRTARRRYTRRKNRICYLQEIFSNEMAKVDDSFFHRLEESFLVEEDKKHERHPIFGNIVDEVAYHEKYPTIYHLRKKLVDSTDKADLRLIYLALAHMIKFRGHFLIEGDLNPDNSDVDKLFIQLVQTYNQLFEENPINASGVDAKAILSARLSKSRRLENLIAQLPGEKKNGLFGNLIALSLGLTPNFKSNFDLAEDAKLQLSKDTYDDDLDNLLAQIGDQYADLFLAAKNLSDAILLSDILRVNTEITKAPLSASMIKRYDEHHQDLTLLKALVRQQLPEKYKEIFFDQSKNGYAGYIDGGASQEEFYKFIKPILEKMDGTEELLVKLNREDLLRKQRTFDNGSIPHQIHLGELHAILRRQEDFYPFLKDNREKIEKILTFRIPYYVGPLARGNSRFAWMTRKSEETITPWNFEEVVDKGASAQSFIERMTNFDKNLPNEKVLPKHSLLYEYFTVYNELTKVKYVTEGMRKPAFLSGEQKKAIVDLLFKTNRKVTVKQLKEDYFKKIECFDSVEISGVEDRFNASLGTYHDLLKIIKDKDFLDNEENEDILEDIVLTLTLFEDREMIEERLKTYAHLFDDKVMKQLKRRRYTGWGRLSRKLINGIRDKQSGKTILDFLKSDGFANRNFMQLIHDDSLTFKEDIQKAQVSGQGDSLHEHIANLAGSPAIKKGILQTVKVVDELVKVMGRHKPENIVIEMARENQTTQKGQKNSRERMKRIEEGIKELGSQILKEHPVENTQLQNEKLYLYYLQNGRDMYVDQELDINRLSDYDVDHIVPQSFLKDDSIDNKVLTRSDKARGKSDNVPSEEVVKKMKNYWRQLLNAKLITQRKFDNLTKAERGGLSELDKAGFIKRQLVETRQITKHVAQILDSRMNTKYDENDKLIREVKVITLKSKLVSDFRKDFQFYKVREINNYHHAHDAYLNAVVGTALIKKYPKLESEFVYGDYKVYDVRKMIAKSEQEIGKATAKYFFYSNIMNFFKTEITLANGEIRKRPLIETNGETGEIVWDKGRDFATVRKVLSMPQVNIVKKTEVQTGGFSKESILPKRNSDKLIARKKDWDPKKYGGFDSPTVAYSVLVVAKVEKGKSKKLKSVKELLGITIMERSSFEKNPIDFLEAKGYKEVKKDLIIKLPKYSLFELENGRKRMLASAGELQKGNELALPSKYVNFLYLASHYEKLKGSPEDNEQKQLFVEQHKHYLDEIIEQISEFSKRVILADANLDKVLSAYNKHRDKPIREQAENIIHLFTLTNLGAPAAFKYFDTTIDRKRYTSTKEVLDATLIHQSITGLYETRIDLSQLGGDGGEAAAKPAPGGGGGTLNLEDEYRLYETSAEPEVSPGSTWLSDFPQAWAETGGMGLAVRQAPLIIPLKATSTPVSIKQYPMSQEAKLGIKPHIQRLLDQGILVPCQSPWNTPLLPVKKPGTNDYRPVQDLREVNKRVEDIHPTVPNPYNLLSGLPPSHRWYTVLDLKDAFFCLRLHPTSQPLFAFEWRDPGMGISGQLTWTRLPQGFKNSPTLFNEALHRDLADFRIQHPDLILLQYVDDILLAATSELDCQQGTRALLLTLGNLGYRASAKKAQLCQKQVKYLGYLLKEGQRWLTEARKETVMGQPTPKTPRQLREFLGTAGFCRLWIPGFAEMAAPLYPLTKPGTLFNWGPDQQKAYQEIKQALLTAPALGLPDLTKPFELFVDEKQGYAKGVLTQKLGPWRRPVAYLSKKLDPVAAGWPPCLRMVAAIAVLRKDAGKLTMGQPLVILAPHAVEALVKQPPDRWLSNARMTHYQAMLLDTDRVQFGPVVALNPATLLPLPEEGAPHDCLEILAETHGTRPDLTDQPIPDADHTWYTDGSSFLQEGQRKAGAAVTTETEVIWARALPAGTSAQRAELIALTQALKMAEGKRLNVYTDSRYAFATAHIHGEIYRRRGWLTSEGREIKNKSEILALLKALFLPKRLSIIHCLGHQKGDSAEARGNRLADQAAREAAIKTPPDTSTLLAGKRTADGSEFEKRTADGSEFESPKKKAKVE

SEQ ID NO: 7508 - protein, 2096 aa, synthetic construct
MPAAKRVKLDGGDKKYSIGLDIGTNSVGWAVITDEYKVPSKKFKVLGNTDRHSIKKNLIGALLFDSGETAEATRLKRTARRRYTRRKNRICYLQEIFSNEMAKVDDSFFHRLEESFLVEEDKKHERHPIFGNIVDEVAYHEKYPTIYHLRKKLVDSTDKADLRLIYLALAHMIKFRGHFLIEGDLNPDNSDVDKLFIQLVQTYNQLFEENPINASGVDAKAILSARLSKSRRLENLIAQLPGEKKNGLFGNLIALSLGLTPNFKSNFDLAEDAKLQLSKDTYDDDLDNLLAQIGDQYADLFLAAKNLSDAILLSDILRVNTEITKAPLSASMIKRYDEHHQDLTLLKALVRQQLPEKYKEIFFDQSKNGYAGYIDGGASQEEFYKFIKPILEKMDGTEELLVKLNREDLLRKQRTFDNGSIPHQIHLGELHAILRRQEDFYPFLKDNREKIEKILTFRIPYYVGPLARGNSRFAWMTRKSEETITPWNFEEVVDKGASAQSFIERMTNFDKNLPNEKVLPKHSLLYEYFTVYNELTKVKYVTEGMRKPAFLSGEQKKAIVDLLFKTNRKVTVKQLKEDYFKKIECFDSVEISGVEDRFNASLGTYHDLLKIIKDKDFLDNEENEDILEDIVLTLTLFEDREMIEERLKTYAHLFDDKVMKQLKRRRYTGWGRLSRKLINGIRDKQSGKTILDFLKSDGFANRNFMQLIHDDSLTFKEDIQKAQVSGQGDSLHEHIANLAGSPAIKKGILQTVKVVDELVKVMGRHKPENIVIEMARENQTTQKGQKNSRERMKRIEEGIKELGSQILKEHPVENTQLQNEKLYLYYLQNGRDMYVDQELDINRLSDYDVDHIVPQSFLKDDSIDNKVLTRSDKARGKSDNVPSEEVVKKMKNYWRQLLNAKLITQRKFDNLTKAERGGLSELDKAGFIKRQLVETRQITKHVAQILDSRMNTKYDENDKLIREVKVITLKSKLVSDFRKDFQFYKVREINNYHHAHDAYLNAVVGTALIKKYPKLESEFVYGDYKVYDVRKMIAKSEQEIGKATAKYFFYSNIMNFFKTEITLANGEIRKRPLIETNGETGEIVWDKGRDFATVRKVLSMPQVNIVKKTEVQTGGFSKESILPKRNSDKLIARKKDWDPKKYGGFDSPTVAYSVLVVAKVEKGKSKKLKSVKELLGITIMERSSFEKNPIDFLEAKGYKEVKKDLIIKLPKYSLFELENGRKRMLASAGELQKGNELALPSKYVNFLYLASHYEKLKGSPEDNEQKQLFVEQHKHYLDEIIEQISEFSKRVILADANLDKVLSAYNKHRDKPIREQAENIIHLFTLTNLGAPAAFKYFDTTIDRKRYTSTKEVLDATLIHQSITGLYETRIDLSQLGGDGGEAAAKPAPGGGGGTLGIEDEYRLHETSTEPDVSLGSTWLSDFPQAWAETGGMGLAVRQAPLIIPLKATSTPVSIQQYPMSHEARLGIKPHIQRLLDQGILVPCQSPWNTPLLPVKKPGTNDYRPVQDLREVNKRVEDIHPTVPNPYNLLSGLPPSHQWYTVLDLKDAFFCLRLHPTSQPLFAFEWRDPGMGISGQLTWTRLPQGFKNSPTLFNEALHRDLADFRIQHPDLILLQYVDDILLAATSELDCQQGTRALLQTLGDLGYRASAKKAQICQKQVKYLGYLLREGQRWLTEARKETVMGQPVPKTPRQLREFLGTAGFCRLWIPGFAEMAAPLYPLTKPGTLFSWGPDQQKAYQEIKQALLTAPALGLPDLTKPFELFVDEKQGYAKGVLTQKLGPWRRPVAYLSKKLDPVAAGWPPCLRMVAAIAVLTKDAGKLTMGQPLVILAPHAVEALVKQPPDRWLSNARMTHYQAMLLDTDRVQFGPVVALNPATLLPLPEEGAPHDCLEILAETHGTRPDLTDQPIPDADHTWYTDGSSFLQEGQRKAGAAVTTETEVIWAGALPAGTSAQRAELIALTQALKMAEGKRLNVYTDSRYAFATAHIHGEIYRRRGWLTSEGREIKNKSEILALLKALFLPKRLSIIHCLGHQKGDSAEARGNRLADQAAREAAIKTPPDTSTLLAGKRTADGSEFEKRTADGSEFESPKKKAKVE

SEQ ID NO: 7509 - protein, 2096 aa, synthetic construct; identical to SEQ ID NO: 4536

SEQ ID NO: 7510 - protein, 2096 aa, synthetic construct
MPAAKRVKLDGGDKKYSIGLDIGTNSVGWAVITDEYKVPSKKFKVLGNTDRHSIKKNLIGALLFDSGETAEATRLKRTARRRYTRRKNRICYLQEIFSNEMAKVDDSFFHRLEESFLVEEDKKHERHPIFGNIVDEVAYHEKYPTIYHLRKKLVDSTDKADLRLIYLALAHMIKFRGHFLIEGDLNPDNSDVDKLFIQLVQTYNQLFEENPINASGVDAKAILSARLSKSRRLENLIAQLPGEKKNGLFGNLIALSLGLTPNFKSNFDLAEDAKLQLSKDTYDDDLDNLLAQIGDQYADLFLAAKNLSDAILLSDILRVNTEITKAPLSASMIKRYDEHHQDLTLLKALVRQQLPEKYKEIFFDQSKNGYAGYIDGGASQEEFYKFIKPILEKMDGTEELLVKLNREDLLRKQRTFDNGSIPHQIHLGELHAILRRQEDFYPFLKDNREKIEKILTFRIPYYVGPLARGNSRFAWMTRKSEETITPWNFEEVVDKGASAQSFIERMTNFDKNLPNEKVLPKHSLLYEYFTVYNELTKVKYVTEGMRKPAFLSGEQKKAIVDLLFKTNRKVTVKQLKEDYFKKIECFDSVEISGVEDRFNASLGTYHDLLKIIKDKDFLDNEENEDILEDIVLTLTLFEDREMIEERLKTYAHLFDDKVMKQLKRRRYTGWGRLSRKLINGIRDKQSGKTILDFLKSDGFANRNFMQLIHDDSLTFKEDIQKAQVSGQGDSLHEHIANLAGSPAIKKGILQTVKVVDELVKVMGRHKPENIVIEMARENQTTQKGQKNSRERMKRIEEGIKELGSQILKEHPVENTQLQNEKLYLYYLQNGRDMYVDQELDINRLSDYDVDHIVPQSFLKDDSIDNKVLTRSDKARGKSDNVPSEEVVKKMKNYWRQLLNAKLITQRKFDNLTKAERGGLSELDKAGFIKRQLVETRQITKHVAQILDSRMNTKYDENDKLIREVKVITLKSKLVSDFRKDFQFYKVREINNYHHAHDAYLNAVVGTALIKKYPKLESEFVYGDYKVYDVRKMIAKSEQEIGKATAKYFFYSNIMNFFKTEITLANGEIRKRPLIETNGETGEIVWDKGRDFATVRKVLSMPQVNIVKKTEVQTGGFSKESILPKRNSDKLIARKKDWDPKKYGGFDSPTVAYSVLVVAKVEKGKSKKLKSVKELLGITIMERSSFEKNPIDFLEAKGYKEVKKDLIIKLPKYSLFELENGRKRMLASAGELQKGNELALPSKYVNFLYLASHYEKLKGSPEDNEQKQLFVEQHKHYLDEIIEQISEFSKRVILADANLDKVLSAYNKHRDKPIREQAENIIHLFTLTNLGAPAAFKYFDTTIDRKRYTSTKEVLDATLIHQSITGLYETRIDLSQLGGDGGEAAAKPAPGGGGGTLNIEDEYRLHETSKGPDVPLGSTWLSDFPQAWAETGGMGLAVRQAPLIIPLKATSTPVSIKQYPMSQEARLGIKPHIQRLLDQGILVPCQSPWNTPLLPVKKPGTNDYRPVQDLREVNKRVEDIHPTVPNPYNLLSGLPPSHQWYTVLDLKDAFFCLRLHPTSQSLFAFEWRDPEMGISGQLTWTRLPQGFKNSPTLFNEALHRDLADFRIQHPDLILLQYVDDLLLAATSELDCQQGTRALLQTLGDLGYRASAKKAQICQKQVKYLGYLLKEGQRWLTEARKETVMGQPTPKTPRQLREFLGTAGFCRLWIPGFAEMAAPLYPLTKPGTLFEWGPDQQKAYQEIKQALLTAPALGLPDLTKPFELFVDEKQGYAKGVLTQKLGPWRRPVAYLSKKLDPVAAGWPPCLRMVAAIAVLTKDAGKLTMGQPLVILAPHAVEALVKQPPDRWLSNARMTHYQALLLDTDRVQFGPIVALNPATLLPLPEEGLQHDCLDILAEAHGTRPDLTDQPLPDADHTWYTDGSSFLQEGQRKAGAAVTTETEVVWAKALPAGTSAQRAELIALTQALKMAEGKKLNVYTDSRYAFATAHIHGEIYRRRGWLTSEGKEIKNKDEILALLKALFLPKRLSIIHCPGHQKGNRAEARGNRMADQAAREVATRETPETSTLLAGKRTADGSEFEKRTADGSEFESPKKKAKVE

SEQ ID NO: 7511 - protein, 2096 aa, synthetic construct
MPAAKRVKLDGGDKKYSIGLDIGTNSVGWAVITDEYKVPSKKFKVLGNTDRHSIKKNLIGALLFDSGETAEATRLKRTARRRYTRRKNRICYLQEIFSNEMAKVDDSFFHRLEESFLVEEDKKHERHPIFGNIVDEVAYHEKYPTIYHLRKKLVDSTDKADLRLIYLALAHMIKFRGHFLIEGDLNPDNSDVDKLFIQLVQTYNQLFEENPINASGVDAKAILSARLSKSRRLENLIAQLPGEKKNGLFGNLIALSLGLTPNFKSNFDLAEDAKLQLSKDTYDDDLDNLLAQIGDQYADLFLAAKNLSDAILLSDILRVNTEITKAPLSASMIKRYDEHHQDLTLLKALVRQQLPEKYKEIFFDQSKNGYAGYIDGGASQEEFYKFIKPILEKMDGTEELLVKLNREDLLRKQRTFDNGSIPHQIHLGELHAILRRQEDFYPFLKDNREKIEKILTFRIPYYVGPLARGNSRFAWMTRKSEETITPWNFEEVVDKGASAQSFIERMTNFDKNLPNEKVLPKHSLLYEYFTVYNELTKVKYVTEGMRKPAFLSGEQKKAIVDLLFKTNRKVTVKQLKEDYFKKIECFDSVEISGVEDRFNASLGTYHDLLKIIKDKDFLDNEENEDILEDIVLTLTLFEDREMIEERLKTYAHLFDDKVMKQLKRRRYTGWGRLSRKLINGIRDKQSGKTILDFLKSDGFANRNFMQLIHDDSLTFKEDIQKAQVSGQGDSLHEHIANLAGSPAIKKGILQTVKVVDELVKVMGRHKPENIVIEMARENQTTQKGQKNSRERMKRIEEGIKELGSQILKEHPVENTQLQNEKLYLYYLQNGRDMYVDQELDINRLSDYDVDHIVPQSFLKDDSIDNKVLTRSDKARGKSDNVPSEEVVKKMKNYWRQLLNAKLITQRKFDNLTKAERGGLSELDKAGFIKRQLVETRQITKHVAQILDSRMNTKYDENDKLIREVKVITLKSKLVSDFRKDFQFYKVREINNYHHAHDAYLNAVVGTALIKKYPKLESEFVYGDYKVYDVRKMIAKSEQEIGKATAKYFFYSNIMNFFKTEITLANGEIRKRPLIETNGETGEIVWDKGRDFATVRKVLSMPQVNIVKKTEVQTGGFSKESILPKRNSDKLIARKKDWDPKKYGGFDSPTVAYSVLVVAKVEKGKSKKLKSVKELLGITIMERSSFEKNPIDFLEAKGYKEVKKDLIIKLPKYSLFELENGRKRMLASAGELQKGNELALPSKYVNFLYLASHYEKLKGSPEDNEQKQLFVEQHKHYLDEIIEQISEFSKRVILADANLDKVLSAYNKHRDKPIREQAENIIHLFTLTNLGAPAAFKYFDTTIDRKRYTSTKEVLDATLIHQSITGLYETRIDLSQLGGDGGEAAAKPAPGGGGGTLNIEDEHRLHETSKEPDVSLGSTWLSDFPQAWAETGGMGLAVRQAPLIIPLKATSTPVSIKQYPMSQEARLGIKPHIQRLLDQGILVPCQSPWNTPLLPVKKPGTNDYRPVQDLREVNKRVEDIHPTVPNPYNLLSGLPPSHQWYTVLDLKDAFFCLRLHPTSQPLFAFEWRDPEMGISGQLTWTRLPQGFKNSPTLFDEALHRDLADFRIQHPDLILLQYVDDLLLAATSELDCQQGTRALLQTLGNLGYRASAKKAQICQKQVKYLGYLLKEGQRWLTEARKETVMGQPTPKTPRQLREFLGTAGFCRLWIPGFAEMAAPLYPLTKTGTLFNWGPDQQKAYQEIKQALLTAPALGLPDLTKPFELFVDEKQGYAKGVLTQKLGPWRRPVAYLSKKLDPVAAGWPPCLRMVAAIAVLTKDAGKLTMGQPLVILAPHAVEALVKQPPDRWLSNARMTHYQALLLDTDRVQFGPVVALNPATLLPLPEEGLQHNCLDILAEAHGTRPDLTDQPLPDADHTWYTDGSSLLQEGQRKAGAAVTTETEVIWAKALPAGTSAQRAELIALTQALKMAEGKKLNVYTDSRYAFATAHIHGEIYRRRGLLTSEGKEIKNKDEILALLKALFLPKRLSIIHCPGHQKGHSAEARGNRMADQAARKAAITETPDTSTLLAGKRTADGSEFEKRTADGSEFESPKKKAKVE

SEQ ID NO: 7512 - protein, 2024 aa, synthetic construct
MPAAKRVKLDGGDKKYSIGLDIGTNSVGWAVITDEYKVPSKKFKVLGNTDRHSIKKNLIGALLFDSGETAEATRLKRTARRRYTRRKNRICYLQEIFSNEMAKVDDSFFHRLEESFLVEEDKKHERHPIFGNIVDEVAYHEKYPTIYHLRKKLVDSTDKADLRLIYLALAHMIKFRGHFLIEGDLNPDNSDVDKLFIQLVQTYNQLFEENPINASGVDAKAILSARLSKSRRLENLIAQLPGEKKNGLFGNLIALSLGLTPNFKSNFDLAEDAKLQLSKDTYDDDLDNLLAQIGDQYADLFLAAKNLSDAILLSDILRVNTEITKAPLSASMIKRYDEHHQDLTLLKALVRQQLPEKYKEIFFDQSKNGYAGYIDGGASQEEFYKFIKPILEKMDGTEELLVKLNREDLLRKQRTFDNGSIPHQIHLGELHAILRRQEDFYPFLKDNREKIEKILTFRIPYYVGPLARGNSRFAWMTRKSEETITPWNFEEVVDKGASAQSFIERMTNFDKNLPNEKVLPKHSLLYEYFTVYNELTKVKYVTEGMRKPAFLSGEQKKAIVDLLFKTNRKVTVKQLKEDYFKKIECFDSVEISGVEDRFNASLGTYHDLLKIIKDKDFLDNEENEDILEDIVLTLTLFEDREMIEERLKTYAHLFDDKVMKQLKRRRYTGWGRLSRKLINGIRDKQSGKTILDFLKSDGFANRNFMQLIHDDSLTFKEDIQKAQVSGQGDSLHEHIANLAGSPAIKKGILQTVKVVDELVKVMGRHKPENIVIEMARENQTTQKGQKNSRERMKRIEEGIKELGSQILKEHPVENTQLQNEKLYLYYLQNGRDMYVDQELDINRLSDYDVDHIVPQSFLKDDSIDNKVLTRSDKARGKSDNVPSEEVVKKMKNYWRQLLNAKLITQRKFDNLTKAERGGLSELDKAGFIKRQLVETRQITKHVAQILDSRMNTKYDENDKLIREVKVITLKSKLVSDFRKDFQFYKVREINNYHHAHDAYLNAVVGTALIKKYPKLESEFVYGDYKVYDVRKMIAKSEQEIGKATAKYFFYSNIMNFFKTEITLANGEIRKRPLIETNGETGEIVWDKGRDFATVRKVLSMPQVNIVKKTEVQTGGFSKESILPKRNSDKLIARKKDWDPKKYGGFDSPTVAYSVLVVAKVEKGKSKKLKSVKELLGITIMERSSFEKNPIDFLEAKGYKEVKKDLIIKLPKYSLFELENGRKRMLASAGELQKGNELALPSKYVNFLYLASHYEKLKGSPEDNEQKQLFVEQHKHYLDEIIEQISEFSKRVILADANLDKVLSAYNKHRDKPIREQAENIIHLFTLTNLGAPAAFKYFDTTIDRKRYTSTKEVLDATLIHQSITGLYETRIDLSQLGGDGGEAAAKPAPGGGGGGRDIMKDIKVRLMTDSPDDSQDLMIGAIESNLFADQISWKSDQPVWLNQWPLKQEKLQALQQLVTEQLQLGHLEESNSPWNTPVFVIKKKSGKWRLLQDLRAVNATMHDMGALQPGLPSPVAVPKGWEIIIIDLQDCFFNIKLHPEDCKRFAFSVPSPNFKRPYQRFQWKVLPQGMKNSPTLCQKFVDKAILTVRDKYQDSYIVHYMDDILLAHPSRSIVDEILTSMIQALNKHGLVVSTEKIQKYDNLKYLGTHIQGDSVSYQKLQIRTDKLRTLNDFQKLLGNINWIRPFLKLTTGELKPLFEILNGDSNPISTRKLTPEACKALQLMNERLSTARVKRLDLSQPWSLCILKTEYTPTACLWQDGVVEWIHLPHISPKVITPYDIFCTQLIIKGRHRSKELFSKDPDYIVVPYTKVQFDLLLQEKEDWPISLLGFLGEVHFHLPKDPLLTFTLQTAIIFPHMTSTTPLEKGIVIFTDGSANGRSVTYIQGREPIIKENTQNTAQQAEIVAVITAFEEVSQPFNLYTDSKYVTGLFPEIETATLSPRTKIYTELKHLQRLIHKRQEKFYIGHIRGHTGLPGPLAQGNAYADSLTRILTAGKRTADGSEFEKRTADGSEFESPKKKAKVE

SEQ ID NO: 7513 - protein, 2088 aa, synthetic construct
MPAAKRVKLDGGDKKYSIGLDIGTNSVGWAVITDEYKVPSKKFKVLGNTDRHSIKKNLIGALLFDSGETAEATRLKRTARRRYTRRKNRICYLQEIFSNEMAKVDDSFFHRLEESFLVEEDKKHERHPIFGNIVDEVAYHEKYPTIYHLRKKLVDSTDKADLRLIYLALAHMIKFRGHFLIEGDLNPDNSDVDKLFIQLVQTYNQLFEENPINASGVDAKAILSARLSKSRRLENLIAQLPGEKKNGLFGNLIALSLGLTPNFKSNFDLAEDAKLQLSKDTYDDDLDNLLAQIGDQYADLFLAAKNLSDAILLSDILRVNTEITKAPLSASMIKRYDEHHQDLTLLKALVRQQLPEKYKEIFFDQSKNGYAGYIDGGASQEEFYKFIKPILEKMDGTEELLVKLNREDLLRKQRTFDNGSIPHQIHLGELHAILRRQEDFYPFLKDNREKIEKILTFRIPYYVGPLARGNSRFAWMTRKSEETITPWNFEEVVDKGASAQSFIERMTNFDKNLPNEKVLPKHSLLYEYFTVYNELTKVKYVTEGMRKPAFLSGEQKKAIVDLLFKTNRKVTVKQLKEDYFKKIECFDSVEISGVEDRFNASLGTYHDLLKIIKDKDFLDNEENEDILEDIVLTLTLFEDREMIEERLKTYAHLFDDKVMKQLKRRRYTGWGRLSRKLINGIRDKQSGKTILDFLKSDGFANRNFMQLIHDDSLTFKEDIQKAQVSGQGDSLHEHIANLAGSPAIKKGILQTVKVVDELVKVMGRHKPENIVIEMARENQTTQKGQKNSRERMKRIEEGIKELGSQILKEHPVENTQLQNEKLYLYYLQNGRDMYVDQELDINRLSDYDVDHIVPQSFLKDDSIDNKVLTRSDKARGKSDNVPSEEVVKKMKNYWRQLLNAKLITQRKFDNLTKAERGGLSELDKAGFIKRQLVETRQITKHVAQILDSRMNTKYDENDKLIREVKVITLKSKLVSDFRKDFQFYKVREINNYHHAHDAYLNAVVGTALIKKYPKLESEFVYGDYKVYDVRKMIAKSEQEIGKATAKYFFYSNIMNFFKTEITLANGEIRKRPLIETNGETGEIVWDKGRDFATVRKVLSMPQVNIVKKTEVQTGGFSKESILPKRNSDKLIARKKDWDPKKYGGFDSPTVAYSVLVVAKVEKGKSKKLKSVKELLGITIMERSSFEKNPIDFLEAKGYKEVKKDLIIKLPKYSLFELENGRKRMLASAGELQKGNELALPSKYVNFLYLASHYEKLKGSPEDNEQKQLFVEQHKHYLDEIIEQISEFSKRVILADANLDKVLSAYNKHRDKPIREQAENIIHLFTLTNLGAPAAFKYFDTTIDRKRYTSTKEVLDATLIHQSITGLYETRIDLSQLGGDGGEAAAKPAPGGGGGLDDEYRLYSPLVKPDQNIQFWLEQFPQAWAETAGMGLAKQVPPQVIQLKASATPVSVRQYPLSKEAQEGIRPHVQRLIQQGILVPVQSPWNTPLLPVRKPGTNDYRPVQDLREVNKRVQDIHPTVPNPYNLLCALPPQRSWYTVLDLKDAFFCLRLHPTSQPLFAFEWRDPGTGRTGQLTWTRLPQGFKNSPTIFNEALHRDLANFRIQHPQVTLLQYVDDLLLAGATKQDCLEGTKALLLELSDLGYRASAKKAQICRREVTYLGYSLRDGQRWLTEARKKTVVQIPAPTTAKQVREFLGKAGFCRLFIPGFATLAAPLYPLTKPKGEFSWAPEHQKAFDAIKKALLSAPALALPDVTKPFTLYVDERKGVARGVLTQTLGPWRRPVAYLSKKLDPVASGWPVCLKAIAAVAILVKDADKLTLGQNITVIAPHALENIVRQPPDRWMTNARMTHYQSLLLTERVTFAPPAALNPATLLPEETDEPVTHDCHQLLIEETGVRKDLTDIPLTGEVLTWFTDGSSYVVEGKRMAGAAVVDGTRTIWASSLPEGTSAQKAELMALTQALRLAEGKSINIYTDSRYAFATAHVHGAIYKQRGWLTSAGREIKNKEEILSLLEALHLPKRLAIIHCPGHQKAKDPISRGNQMADRVAKQAAQGVNLLPAGKRTADGSEFEKRTADGSEFESPKKKAKVE

SEQ ID NO: 7514 - protein, 2090 aa, synthetic construct
MPAAKRVKLDGGDKKYSIGLDIGTNSVGWAVITDEYKVPSKKFKVLGNTDRHSIKKNLIGALLFDSGETAEATRLKRTARRRYTRRKNRICYLQEIFSNEMAKVDDSFFHRLEESFLVEEDKKHERHPIFGNIVDEVAYHEKYPTIYHLRKKLVDSTDKADLRLIYLALAHMIKFRGHFLIEGDLNPDNSDVDKLFIQLVQTYNQLFEENPINASGVDAKAILSARLSKSRRLENLIAQLPGEKKNGLFGNLIALSLGLTPNFKSNFDLAEDAKLQLSKDTYDDDLDNLLAQIGDQYADLFLAAKNLSDAILLSDILRVNTEITKAPLSASMIKRYDEHHQDLTLLKALVRQQLPEKYKEIFFDQSKNGYAGYIDGGASQEEFYKFIKPILEKMDGTEELLVKLNREDLLRKQRTFDNGSIPHQIHLGELHAILRRQEDFYPFLKDNREKIEKILTFRIPYYVGPLARGNSRFAWMTRKSEETITPWNFEEVVDKGASAQSFIERMTNFDKNLPNEKVLPKHSLLYEYFTVYNELTKVKYVTEGMRKPAFLSGEQKKAIVDLLFKTNRKVTVKQLKEDYFKKIECFDSVEISGVEDRFNASLGTYHDLLKIIKDKDFLDNEENEDILEDIVLTLTLFEDREMIEERLKTYAHLFDDKVMKQLKRRRYTGWGRLSRKLINGIRDKQSGKTILDFLKSDGFANRNFMQLIHDDSLTFKEDIQKAQVSGQGDSLHEHIANLAGSPAIKKGILQTVKVVDELVKVMGRHKPENIVIEMARENQTTQKGQKNSRERMKRIEEGIKELGSQILKEHPVENTQLQNEKLYLYYLQNGRDMYVDQELDINRLSDYDVDHIVPQSFLKDDSIDNKVLTRSDKARGKSDNVPSEEVVKKMKNYWRQLLNAKLITQRKFDNLTKAERGGLSELDKAGFIKRQLVETRQITKHVAQILDSRMNTKYDENDKLIREVKVITLKSKLVSDFRKDFQFYKVREINNYHHAHDAYLNAVVGTALIKKYPKLESEFVYGDYKVYDVRKMIAKSEQEIGKATAKYFFYSNIMNFFKTEITLANGEIRKRPLIETNGETGEIVWDKGRDFATVRKVLSMPQVNIVKKTEVQTGGFSKESILPKRNSDKLIARKKDWDPKKYGGFDSPTVAYSVLVVAKVEKGKSKKLKSVKELLGITIMERSSFEKNPIDFLEAKGYKEVKKDLIIKLPKYSLFELENGRKRMLASAGELQKGNELALPSKYVNFLYLASHYEKLKGSPEDNEQKQLFVEQHKHYLDEIIEQISEFSKRVILADANLDKVLSAYNKHRDKPIREQAENIIHLFTLTNLGAPAAFKYFDTTIDRKRYTSTKEVLDATLIHQSITGLYETRIDLSQLGGDGGEAAAKPAPGGGGGTLQLDDEYRLYSPLVKPDQNIQFWLEQFPQAWAETAGMGLAKQVPPQVIQLKASATPVSVRQYPLSKEAQEGIRPHVQRLIQQGILVPVQSPWNTPLLPVRKPGTNDYRPVQDLREVNKRVQDIHPTVPNPYNLLCALPPQRSWYTVLDLKDAFFCLRLHPTSQPLFAFEWRDPGTGRTGQLTWTRLPQGFKNSPTIFDEALHRDLANFRIQHPQVTLLQYVDDLLLAGATKQDCLEGTKALLLELSDLGYRASAKKAQICRREVTYLGYSLRDGQRWLTEARKKTVVQIPAPTTAKQVREFLGTAGFCRLWIPGFATLAAPLYPLTKEKGEFSWAPEHQKAFDAIKKALLSAPALALPDVTKPFTLYVDERKGVARGVLTQTLGPWRRPVAYLSKKLDPVASGWPVCLKAIAAVAILVKDADKLTLGQNITVIAPHALENIVRQPPDRWMTNARMTHYQSLLLTERVTFAPPAALNPATLLPEETDEPVTHDCHQLLIEETGVRKDLTDIPLTGEVLTWFTDGSSYVVEGKRMAGAAVVDGTRTIWASSLPEGTSAQKAELMALTQALRLAEGKSINIYTDSRYAFATAHVHGAIYKQRGLLTSAGREIKNKEEILSLLEALHLPKRLAIIHCPGHQKAKDPISRGNQMADRVAKQAAQGVNLLAGKRTADGSEFEKRTADGSEFESPKKKAKVE

SEQ ID NO: 7515 - protein, 2088 aa, synthetic construct; identical to SEQ ID NO: 7513

SEQ ID NO: 7516 - protein, 2176 aa, synthetic construct
MPAAKRVKLDGGDKKYSIGLDIGTNSVGWAVITDEYKVPSKKFKVLGNTDRHSIKKNLIGALLFDSGETAEATRLKRTARRRYTRRKNRICYLQEIFSNEMAKVDDSFFHRLEESFLVEEDKKHERHPIFGNIVDEVAYHEKYPTIYHLRKKLVDSTDKADLRLIYLALAHMIKFRGHFLIEGDLNPDNSDVDKLFIQLVQTYNQLFEENPINASGVDAKAILSARLSKSRRLENLIAQLPGEKKNGLFGNLIALSLGLTPNFKSNFDLAEDAKLQLSKDTYDDDLDNLLAQIGDQYADLFLAAKNLSDAILLSDILRVNTEITKAPLSASMIKRYDEHHQDLTLLKALVRQQLPEKYKEIFFDQSKNGYAGYIDGGASQEEFYKFIKPILEKMDGTEELLVKLNREDLLRKQRTFDNGSIPHQIHLGELHAILRRQEDFYPFLKDNREKIEKILTFRIPYYVGPLARGNSRFAWMTRKSEETITPWNFEEVVDKGASAQSFIERMTNFDKNLPNEKVLPKHSLLYEYFTVYNELTKVKYVTEGMRKPAFLSGEQKKAIVDLLFKTNRKVTVKQLKEDYFKKIECFDSVEISGVEDRFNASLGTYHDLLKIIKDKDFLDNEENEDILEDIVLTLTLFEDREMIEERLKTYAHLFDDKVMKQLKRRRYTGWGRLSRKLINGIRDKQSGKTILDFLKSDGFANRNFMQLIHDDSLTFKEDIQKAQVSGQGDSLHEHIANLAGSPAIKKGILQTVKVVDELVKVMGRHKPENIVIEMARENQTTQKGQKNSRERMKRIEEGIKELGSQILKEHPVENTQLQNEKLYLYYLQNGRDMYVDQELDINRLSDYDVDHIVPQSFLKDDSIDNKVLTRSDKARGKSDNVPSEEVVKKMKNYWRQLLNAKLITQRKFDNLTKAERGGLSELDKAGFIKRQLVETRQITKHVAQILDSRMNTKYDENDKLIREVKVITLKSKLVSDFRKDFQFYKVREINNYHHAHDAYLNAVVGTALIKKYPKLESEFVYGDYKVYDVRKMIAKSEQEIGKATAKYFFYSNIMNFFKTEITLANGEIRKRPLIETNGETGEIVWDKGRDFATVRKVLSMPQVNIVKKTEVQTGGFSKESILPKRNSDKLIARKKDWDPKKYGGFDSPTVAYSVLVVAKVEKGKSKKLKSVKELLGITIMERSSFEKNPIDFLEAKGYKEVKKDLIIKLPKYSLFELENGRKRMLASAGELQKGNELALPSKYVNFLYLASHYEKLKGSPEDNEQKQLFVEQHKHYLDEIIEQISEFSKRVILADANLDKVLSAYNKHRDKPIREQAENIIHLFTLTNLGAPAAFKYFDTTIDRKRYTSTKEVLDATLIHQSITGLYETRIDLSQLGGDGGEAAAKPAPGGGGGMDPLQLLQPLEAEIKGTKLKAHWNSGATITCVPEAFLEDERPIQTMLIKTIHGEKQQDVYYLTFKVQGRKVEAEVLASPYDYILLNPSDVPWLMKKPLQLTVLVPLHEYQERLLQQTALPKEQKELLQKLFLKYDALWQHWENQVGHRRIKPHNIATGTLAPRPQKQYPINPKAKPSIQIVIDDLLKQGVLIQQNSTMNTPVYPVPKPDGKWRMVLDYREVNKTIPLIAAQNQHSAGILSSIYRGKYKTTLDLTNGFWAHPITPESYWLTAFTWQGKQYCWTRLPQGFLNSPALFNADVVDLLKEIPNVQAYVDDIYISHDDPQEHLEQLEKIFSILLNAGYVVSLKKSEIAQREVEFLGFNITKEGRGLTDTFKQKLLNITPPKDLKQLQSILGKLNFARNFIPNYSELVKPLYTIVAPANGKFISWTEDNSNQLQHIISVLNQADNLEERNPETRLIIKVNSSPSAGYIRYYNEGSKRPIMYVNYIFSKAEAKFTQTEKLLTTMHKGLIKAMDLAMGQEILVYSPIVSMTKIQRTPLPERKALPVRWITWMTYLEDPRIQFHYDKSLPELQQIPNVTEDVIAKTKHPSEFAMVFYTDGSAIKHPDVNKSHSAGMGIAQVQFIPEYKIVHQWSIPLGDHTAQLAEIAAVEFACKKALKISGPVLIVTDSFYVAESANKELPYWKSNGFLNNKKKPLRHVSKWKSIAECLQLKPDIIIMHEKGHQQPMTTLHTEGNNLADKLATQGSYVVHAGKRTADGSEFEKRTADGSEFESPKKKAKVE

SEQ ID NO: 7517 - protein, 2176 aa, synthetic construct
MPAAKRVKLDGGDKKYSIGLDIGTNSVGWAVITDEYKVPSKKFKVLGNTDRHSIKKNLIGALLFDSGETAEATRLKRTARRRYTRRKNRICYLQEIFSNEMAKVDDSFFHRLEESFLVEEDKKHERHPIFGNIVDEVAYHEKYPTIYHLRKKLVDSTDKADLRLIYLALAHMIKFRGHFLIEGDLNPDNSDVDKLFIQLVQTYNQLFEENPINASGVDAKAILSARLSKSRRLENLIAQLPGEKKNGLFGNLIALSLGLTPNFKSNFDLAEDAKLQLSKDTYDDDLDNLLAQIGDQYADLFLAAKNLSDAILLSDILRVNTEITKAPLSASMIKRYDEHHQDLTLLKALVRQQLPEKYKEIFFDQSKNGYAGYIDGGASQEEFYKFIKPILEKMDGTEELLVKLNREDLLRKQRTFDNGSIPHQIHLGELHAILRRQEDFYPFLKDNREKIEKILTFRIPYYVGPLARGNSRFAWMTRKSEETITPWNFEEVVDKGASAQSFIERMTNFDKNLPNEKVLPKHSLLYEYFTVYNELTKVKYVTEGMRKPAFLSGEQKKAIVDLLFKTNRKVTVKQLKEDYFKKIECFDSVEISGVEDRFNASLGTYHDLLKIIKDKDFLDNEENEDILEDIVLTLTLFEDREMIEERLKTYAHLFDDKVMKQLKRRRYTGWGRLSRKLINGIRDKQSGKTILDFLKSDGFANRNFMQLIHDDSLTFKEDIQKAQVSGQGDSLHEHIANLAGSPAIKKGILQTVKVVDELVKVMGRHKPENIVIEMARENQTTQKGQKNSRERMKRIEEGIKELGSQILKEHPVENTQLQNEKLYLYYLQNGRDMYVDQELDINRLSDYDVDHIVPQSFLKDDSIDNKVLTRSDKARGKSDNVPSEEVVKKMKNYWRQLLNAKLITQRKFDNLTKAERGGLSELDKAGFIKRQLVETRQITKHVAQILDSRMNTKYDENDKLIREVKVITLKSKLVSDFRKDFQFYKVREINNYHHAHDAYLNAVVGTALIKKYPKLESEFVYGDYKVYDVRKMIAKSEQEIGKATAKYFFYSNIMNFFKTEITLANGEIRKRPLIETNGETGEIVWDKGRDFATVRKVLSMPQVNIVKKTEVQTGGFSKESILPKRNSDKLIARKKDWDPKKYGGFDSPTVAYSVLVVAKVEKGKSKKLKSVKELLGITIMERSSFEKNPIDFLEAKGYKEVKKDLIIKLPKYSLFELENGRKRMLASAGELQKGNELALPSKYVNFLYLASHYEKLKGSPEDNEQKQLFVEQHKHYLDEIIEQISEFSKRVILADANLDKVLSAYNKHRDKPIREQAENIIHLFTLTNLGAPAAFKYFDTTIDRKRYTSTKEVLDATLIHQSITGLYETRIDLSQLGGDGGEAAAKPAPGGGGGMDPLQLLQPLEAEIKGTKLKAHWNSGATITCVPQAFLEEEVPIKNIWIKTIHGEKEQPVYYLTFKIQGRKVEAEVISSPYDYILVSPSDIPWLMKKPLQLTTLVPLQEYEERLLKQTMLTGSYKEKLQSLFLKYDALWQHWENQVGHRRIKPHHIATGTVNPRPQKQYPINPKAKASIQTVINDLLKQGVLIQQNSIMNTPVYPVPKPDGKWRMVLDYREVNKTIPLIAAQNQHSAGILSSIFRGKYKTTLDLSNGFWAHSITPESYWLTAFTWLGQQYCWTRLPQGFLNSPALFTADVVDLLKEVPNVQVYVDDIYISHDDPREHLEQLEKVFSLLLNAGYVVSLKKSEIAQHEVEFLGFNITKEGRGLTETFKQKLLNITPPRDLKQLQSILGLLNFARNFIPNFSELVKPLYNIIATANGKYITWTTDNSQQLQNIISMLNSAENLEERNPEVRLIMKVNTSPSAGYIRFYNEFAKRPIMYLNYVYTKAEVKFTNTEKLLTTIHKGLIKALDLGMGQEILVYSPIVSMTKIQKTPLPERKALPIRWITWMSYLEDPRIQFHYDKTLPELQQVPTVTDDIIAKIKHPSEFSMVFYTDGSAIKHPNVNKSHNAGMGIAQVQFKPEFTVINTWSIPLGDHTAQLAEVAAVEFACKKALKIDGPVLIVTDSFYVAESVNKELPYWQSNGFFNNKKKPLKHVSKWKSIADCIQLKPDIIIIHEKGHQPTASTFHTEGNNLADKLATQGSYVVNAGKRTADGSEFEKRTADGSEFESPKKKAKVE

SEQ ID NO: 7518 - protein, 2087 aa, synthetic construct
MPAAKRVKLDGGDKKYSIGLDIGTNSVGWAVITDEYKVPSKKFKVLGNTDRHSIKKNLIGALLFDSGETAEATRLKRTARRRYTRRKNRICYLQEIFSNEMAKVDDSFFHRLEESFLVEEDKKHERHPIFGNIVDEVAYHEKYPTIYHLRKKLVDSTDKADLRLIYLALAHMIKFRGHFLIEGDLNPDNSDVDKLFIQLVQTYNQLFEENPINASGVDAKAILSARLSKSRRLENLIAQLPGEKKNGLFGNLIALSLGLTPNFKSNFDLAEDAKLQLSKDTYDDDLDNLLAQIGDQYADLFLAAKNLSDAILLSDILRVNTEITKAPLSASMIKRYDEHHQDLTLLKALVRQQLPEKYKEIFFDQSKNGYAGYIDGGASQEEFYKFIKPILEKMDGTEELLVKLNREDLLRKQRTFDNGSIPHQIHLGELHAILRRQEDFYPFLKDNREKIEKILTFRIPYYVGPLARGNSRFAWMTRKSEETITPWNFEEVVDKGASAQSFIERMTNFDKNLPNEKVLPKHSLLYEYFTVYNELTKVKYVTEGMRKPAFLSGEQKKAIVDLLFKTNRKVTVKQLKEDYFKKIECFDSVEISGVEDRFNASLGTYHDLLKIIKDKDFLDNEENEDILEDIVLTLTLFEDREMIEERLKTYAHLFDDKVMKQLKRRRYTGWGRLSRKLINGIRDKQSGKTILDFLKSDGFANRNFMQLIHDDSLTFKEDIQKAQVSGQGDSLHEHIANLAGSPAIKKGILQTVKVVDELVKVMGRHKPENIVIEMARENQTTQKGQKNSRERMKRIEEGIKELGSQILKEHPVENTQLQNEKLYLYYLQNGRDMYVDQELDINRLSDYDVDHIVPQSFLKDDSIDNKVLTRSDKARGKSDNVPSEEVVKKMKNYWRQLLNAKLITQRKFDNLTKAERGGLSELDKAGFIKRQLVETRQITKHVAQILDSRMNTKYDENDKLIREVKVITLKSKLVSDFRKDFQFYKVREINNYHHAHDAYLNAVVGTALIKKYPKLESEFVYGDYKVYDVRKMIAKSEQEIGKATAKYFFYSNIMNFFKTEITLANGEIRKRPLIETNGETGEIVWDKGRDFATVRKVLSMPQVNIVKKTEVQTGGFSKESILPKRNSDKLIARKKDWDPKKYGGFDSPTVAYSVLVVAKVEKGKSKKLKSVKELLGITIMERSSFEKNPIDFLEAKGYKEVKKDLIIKLPKYSLFELENGRKRMLASAGELQKGNELALPSKYVNFLYLASHYEKLKGSPEDNEQKQLFVEQHKHYLDEIIEQISEFSKRVILADANLDKVLSAYNKHRDKPIREQAENIIHLFTLTNLGAPAAFKYFDTTIDRKRYTSTKEVLDATLIHQSITGLYETRIDLSQLGGDGGEAAAKPAPGGGGGIPWLMKKPLQLTTLVPLQEYEERLLKQTMLTGSYKEKLQSLFLKYDALWQHWENQVGHRRIKPHHIATGTVNPRPQKQYPINPKAKASIQTVINDLLKQGVLIQQNSIMNTPVYPVPKPDGKWRMVLDYREVNKTIPLIAAQNQHSAGILSSIFRGKYKTTLDLSNGFWAHSITPESYWLTAFTWLGQQYCWTRLPQGFLNSPALFNADVVDLLKEVPNVQVYVDDIYISHDDPREHLEQLEKVFSLLLNAGYVVSLKKSEIAQHEVEFLGFNITKEGRGLTETFKQKLLNITPPRDLKQLQSILGLLNFARNFIPNFSELVKPLYNIIATAPGKYITWTTDNSQQLQNIISMLNSAENLEERNPEVRLIMKVNTSPSAGYIRFYNEFAKRPIMYLNYVYTKAEVKFTNTEKLLTTIHKGLIKALDLGMGQEILVYSPIVSMTKIQKTPLPERKALPIRWITWMSYLEDPRIQFHYDKTLPELQQVPTVTDDIIAKIKHPSEFSMVFYTDGSAIKHPNVNKSHNAGMGIAQVQFKPEFTVINTWSIPLGDHTAQLAEVAAVEFACKKALKIDGPVLIVTDSFYVAESVNKELPYWQSNGFFNNKKKPLKHVSKWKSIADCIQLKPDIIIIHEKGHQPTASTFHTEGNNLADKLATQGSYVVNAGKRTADGSEFEKRTADGSEFESPKKKAKVE

SEQ ID NO: 7519 - protein, 2176 aa, synthetic construct
MPAAKRVKLDGGDKKYSIGLDIGTNSVGWAVITDEYKVPSKKFKVLGNTDRHSIKKNLIGALLFDSGETAEATRLKRTARRRYTRRKNRICYLQEIFSNEMAKVDDSFFHRLEESFLVEEDKKHERHPIFGNIVDEVAYHEKYPTIYHLRKKLVDSTDKADLRLIYLALAHMIKFRGHFLIEGDLNPDNSDVDKLFIQLVQTYNQLFEENPINASGVDAKAILSARLSKSRRLENLIAQLPGEKKNGLFGNLIALSLGLTPNFKSNFDLAEDAKLQLSKDTYDDDLDNLLAQIGDQYADLFLAAKNLSDAILLSDILRVNTEITKAPLSASMIKRYDEHHQDLTLLKALVRQQLPEKYKEIFFDQSKNGYAGYIDGGASQEEFYKFIKPILEKMDGTEELLVKLNREDLLRKQRTFDNGSIPHQIHLGELHAILRRQEDFYPFLKDNREKIEKILTFRIPYYVGPLARGNSRFAWMTRKSEETITPWNFEEVVDKGASAQSFIERMTNFDKNLPNEKVLPKHSLLYEYFTVYNELTKVKYVTEGMRKPAFLSGEQKKAIVDLLFKTNRKVTVKQLKEDYFKKIECFDSVEISGVEDRFNASLGTYHDLLKIIKDKDFLDNEENEDILEDIVLTLTLFEDREMIEERLKTYAHLFDDKVMKQLKRRRYTGWGRLSRKLINGIRDKQSGKTILDFLKSDGFANRNFMQLIHDDSLTFKEDIQKAQVSGQGDSLHEHIANLAGSPAIKKGILQTVKVVDELVKVMGRHKPENIVIEMARENQTTQKGQKNSRERMKRIEEGIKELGSQILKEHPVENTQLQNEKLYLYYLQNGRDMYVDQELDINRLSDYDVDHIVPQSFLKDDSIDNKVLTRSDKARGKSDNVPSEEVVKKMKNYWRQLLNAKLITQRKFDNLTKAERGGLSELDKAGFIKRQLVETRQITKHVAQILDSRMNTKYDENDKLIREVKVITLKSKLVSDFRKDFQFYKVREINNYHHAHDAYLNAVVGTALIKKYPKLESEFVYGDYKVYDVRKMIAKSEQEIGKATAKYFFYSNIMNFFKTEITLANGEIRKRPLIETNGETGEIVWDKGRDFATVRKVLSMPQVNIVKKTEVQTGGFSKESILPKRNSDKLIARKKDWDPKKYGGFDSPTVAYSVLVVAKVEKGKSKKLKSVKELLGITIMERSSFEKNPIDFLEAKGYKEVKKDLIIKLPKYSLFELENGRKRMLASAGELQKGNELALPSKYVNFLYLASHYEKLKGSPEDNEQKQLFVEQHKHYLDEIIEQISEFSKRVILADANLDKVLSAYNKHRDKPIREQAENIIHLFTLTNLGAPAAFKYFDTTIDRKRYTSTKEVLDATLIHQSITGLYETRIDLSQLGGDGGEAAAKPAPGGGGGMDPLQLLQPLEAEIKGTKLKAHWNSGATITCVPQAFLEEEVPIKNIWIKTIHGEKEQPVYYLTFKIQGRKVEAEVISSPYDYILVSPSDIPWLMKKPLQLTTLVPLQEYEERLLKQTMLTGSYKEKLQSLFLKYDALWQHWENQVGHRRIKPHHIATGTVNPRPQKQYPINPKAKASIQTVINDLLKQGVLIQQNSIMNTPVYPVPKPDGKWRMVLDYREVNKTIPLIAAQNQHSAGILSSIFRGKYKTTLDLSNGFWAHSITPESYWLTAFTWLGQQYCWTRLPQGFLNSPALFNADVVDLLKEVPNVQVYVDDIYISHDDPREHLEQLEKVFSLLLNAGYVVSLKKSEIAQHEVEFLGFNITKEGRGLTETFKQKLLNITPPRDLKQLQSILGLLNFARNFIPNFSELVKPLYNIIATAPGKYITWTTDNSQQLQNIISMLNSAENLEERNPEVRLIMKVNTSPSAGYIRFYNEFAKRPIMYLNYVYTKAEVKFTNTEKLLTTIHKGLIKALDLGMGQEILVYSPIVSMTKIQKTPLPERKALPIRWITWMSYLEDPRIQFHYDKTLPELQQVPTVTDDIIAKIKHPSEFSMVFYTDGSAIKHPNVNKSHNAGMGIAQVQFKPEFTVINTWSIPLGDHTAQLAEVAAVEFACKKALKIDGPVLIVTDSFYVAESVNKELPYWQSNGFFNNKKKPLKHVSKWKSIADCIQLKPDIIIIHEKGHQPTASTFHTEGNNLADKLATQGSYVVNAGKRTADGSEFEKRTADGSEFESPKKKAKVE

SEQ ID NO: 7520 - protein, 2017 aa, synthetic construct
MPAAKRVKLDGGDKKYSIGLDIGTNSVGWAVITDEYKVPSKKFKVLGNTDRHSIKKNLIGALLFDSGETAEATRLKRTARRRYTRRKNRICYLQEIFSNEMAKVDDSFFHRLEESFLVEEDKKHERHPIFGNIVDEVAYHEKYPTIYHLRKKLVDSTDKADLRLIYLALAHMIKFRGHFLIEGDLNPDNSDVDKLFIQLVQTYNQLFEENPINASGVDAKAILSARLSKSRRLENLIAQLPGEKKNGLFGNLIALSLGLTPNFKSNFDLAEDAKLQLSKDTYDDDLDNLLAQIGDQYADLFLAAKNLSDAILLSDILRVNTEITKAPLSASMIKRYDEHHQDLTLLKALVRQQLPEKYKEIFFDQSKNGYAGYIDGGASQEEFYKFIKPILEKMDGTEELLVKLNREDLLRKQRTFDNGSIPHQIHLGELHAILRRQEDFYPFLKDNREKIEKILTFRIPYYVGPLARGNSRFAWMTRKSEETITPWNFEEVVDKGASAQSFIERMTNFDKNLPNEKVLPKHSLLYEYFTVYNELTKVKYVTEGMRKPAFLSGEQKKAIVDLLFKTNRKVTVKQLKEDYFKKIECFDSVEISGVEDRFNASLGTYHDLLKIIKDKDFLDNEENEDILEDIVLTLTLFEDREMIEERLKTYAHLFDDKVMKQLKRRRYTGWGRLSRKLINGIRDKQSGKTILDFLKSDGFANRNFMQLIHDDSLTFKEDIQKAQVSGQGDSLHEHIANLAGSPAIKKGILQTVKVVDELVKVMGRHKPENIVIEMARENQTTQKGQKNSRERMKRIEEGIKELGSQILKEHPVENTQLQNEKLYLYYLQNGRDMYVDQELDINRLSDYDVDHIVPQSFLKDDSIDNKVLTRSDKARGKSDNVPSEEVVKKMKNYWRQLLNAKLITQRKFDNLTKAERGGLSELDKAGFIKRQLVETRQITKHVAQILDSRMNTKYDENDKLIREVKVITLKSKLVSDFRKDFQFYKVREINNYHHAHDAYLNAVVGTALIKKYPKLESEFVYGDYKVYDVRKMIAKSEQEIGKATAKYFFYSNIMNFFKTEITLANGEIRKRPLIETNGETGEIVWDKGRDFATVRKVLSMPQVNIVKKTEVQTGGFSKESILPKRNSDKLIARKKDWDPKKYGGFDSPTVAYSVLVVAKVEKGKSKKLKSVKELLGITIMERSSFEKNPIDFLEAKGYKEVKKDLIIKLPKYSLFELENGRKRMLASAGELQKGNELALPSKYVNFLYLASHYEKLKGSPEDNEQKQLFVEQHKHYLDEIIEQISEFSKRVILADANLDKVLSAYNKHRDKPIREQAENIIHLFTLTNLGAPAAFKYFDTTIDRKRYTSTKEVLDATLIHQSITGLYETRIDLSQLGGDGGEAAAKPAPGGGGGPRSRAIDIPVPHADKISWKITDPVWVDQWPLTYEKTLAAIALVQEQLAAGHIEPTNSPWNTPIFIIKKKSGSWRLLQDLRAVNKVMVPMGALQPGLPSPVAPPLNYHKIVIDLKDCFFTIPLHPEDRPYFAFSVPQINFQSPMPRYQWKVLPQGMANSPTLCQKFVAAAIAPVRSQWPEAYILHYMDDILLACDSAEAAKACYAHIISCLTSYGLKIAPDKVQVSEPFSYLGFELHHQQVFTPRVCLKTDHLKTLNDFQKLLGDIQWLRPYLKLPTSALVPLNNILKPDPNPLSVRALTPEAKQSLALINKAIQNQSVQQISYNLPLVLLLLPTPHTPTAVFWQPNGTDPTKNGSPLLWLHLPASPSKVLLTYPSLLAMLIIKGRYTGRQLFGRDPHSIIIPYTQDQLTWLLQTSDEWAIALSSFTGDIDNHYPSDPVIQFAKLHQFIFPKITKCAPIPQATLVFTDGSSNGIAAYVIDNQPISIKSPYLSAQLVELYAILQVFTVLAHQPFNLYTDSAYIAQSVPLLETVPFIKSSTNATPLFSKLQQLILNRQHPFFIGHLRAHLNLPGPLAEGNALADAATQIFPIISDAGKRTADGSEFEKRTADGSEFESPKKKAKVE

SEQ ID NO: 7521 - protein, 2094 aa, synthetic construct
MPAAKRVKLDGGDKKYSIGLDIGTNSVGWAVITDEYKVPSKKFKVLGNTDRHSIKKNLIGALLFDSGETAEATRLKRTARRRYTRRKNRICYLQEIFSNEMAKVDDSFFHRLEESFLVEEDKKHERHPIFGNIVDEVAYHEKYPTIYHLRKKLVDSTDKADLRLIYLALAHMIKFRGHFLIEGDLNPDNSDVDKLFIQLVQTYNQLFEENPINASGVDAKAILSARLSKSRRLENLIAQLPGEKKNGLFGNLIALSLGLTPNFKSNFDLAEDAKLQLSKDTYDDDLDNLLAQIGDQYADLFLAAKNLSDAILLSDILRVNTEITKAPLSASMIKRYDEHHQDLTLLKALVRQQLPEKYKEIFFDQSKNGYAGYIDGGASQEEFYKFIKPILEKMDGTEELLVKLNREDLLRKQRTFDNGSIPHQIHLGELHAILRRQEDFYPFLKDNREKIEKILTFRIPYYVGPLARGNSRFAWMTRKSEETITPWNFEEVVDKGASAQSFIERMTNFDKNLPNEKVLPKHSLLYEYFTVYNELTKVKYVTEGMRKPAFLSGEQKKAIVDLLFKTNRKVTVKQLKEDYFKKIECFDSVEISGVEDRFNASLGTYHDLLKIIKDKDFLDNEENEDILEDIVLTLTLFEDREMIEERLKTYAHLFDDKVMKQLKRRRYTGWGRLSRKLINGIRDKQSGKTILDFLKSDGFANRNFMQLIHDDSLTFKEDIQKAQVSGQGDSLHEHIANLAGSPAIKKGILQTVKVVDELVKVMGRHKPENIVIEMARENQTTQKGQKNSRERMKRIEEGIKELGSQILKEHPVENTQLQNEKLYLYYLQNGRDMYVDQELDINRLSDYDVDHIVPQSFLKDDSIDNKVLTRSDKARGKSDNVPSEEVVKKMKNYWRQLLNAKLITQRKFDNLTKAERGGLSELDKAGFIKRQLVETRQITKHVAQILDSRMNTKYDENDKLIREVKVITLKSKLVSDFRKDFQFYKVREINNYHHAHDAYLNAVVGTALIKKYPKLESEFVYGDYKVYDVRKMIAKSEQEIGKATAKYFFYSNIMNFFKTEITLANGEIRKRPLIETNGETGEIVWDKGRDFATVRKVLSMPQVNIVKKTEVQTGGFSKESILPKRNSDKLIARKKDWDPKKYGGFDSPTVAYSVLVVAKVEKGKSKKLKSVKELLGITIMERSSFEKNPIDFLEAKGYKEVKKDLIIKLPKYSLFELENGRKRMLASAGELQKGNELALPSKYVNFLYLASHYEKLKGSPEDNEQKQLFVEQHKHYLDEIIEQISEFSKRVILADANLDKVLSAYNKHRDKPIREQAENIIHLFTLTNLGAPAAFKYFDTTIDRKRYTSTKEVLDATLIHQSITGLYETRIDLSQLGGDGGEAAAKPAPGGGGGVLNLEEEYRLHEKPVPSSIDPSWLQLFPTVWAERAGMGLANQVPPVVVELRSGASPVAVRQYPMSKEAREGIRPHIQRFLDLGVLVPCQSPWNTPLLPVKKPGTNDYRPVQDLREINKRVQDIHPTVPNPYNLLSSLPPSHTWYSVLDLKDAFFCLKLHPNSQPLFAFEWRDPEKGNTGQLTWTRLPQGFKNSPTLFNEALHRDLAPFRALNPQVVLLQYVDDLLVAAPTYRDCKEGTQKLLQELSKLGYRVSAKKAQLCQKEVTYLGYLLKEGKRWLTPARKATVMKIPPPTTPRQVREFLGKAGFCRLFIPGFASLAAPLYPLTKPSIPFIWTEEHQKAFDRIKEALLSAPALALPDLTKPFTLYVDERAGVARGVLTQTLGPWRRPVAYLSKKLDPVASGWPTCLKAVAAVALLLKDADKLTLGQNVTVIASHSLESIVRQPPDRWMTNARMTHYQSLLLNERVSFAPPAVLNPATLLPVESEATPVHRCSEILAEETGTRRDLKDQPLPGVPAWYTDGSSFIAEGKRRAGAAIVDGKRTVWASSLPEGTSAQKAELVALTQALRLAEGKDINIYTDSRYAFATAHIHGAIYKQRGWLTSAGKDIKNKEEILALLEAIHLPKRVAIIHCPGHQKGNDPVATGNRRADEAAKQAALSTRVLAETTKPAGKRTADGSEFEKRTADGSEFESPKKKAKVE

SEQ ID NO: 7522 - protein, 2096 aa, synthetic construct
MPAAKRVKLDGGDKKYSIGLDIGTNSVGWAVITDEYKVPSKKFKVLGNTDRHSIKKNLIGALLFDSGETAEATRLKRTARRRYTRRKNRICYLQEIFSNEMAKVDDSFFHRLEESFLVEEDKKHERHPIFGNIVDEVAYHEKYPTIYHLRKKLVDSTDKADLRLIYLALAHMIKFRGHFLIEGDLNPDNSDVDKLFIQLVQTYNQLFEENPINASGVDAKAILSARLSKSRRLENLIAQLPGEKKNGLFGNLIALSLGLTPNFKSNFDLAEDAKLQLSKDTYDDDLDNLLAQIGDQYADLFLAAKNLSDAILLSDILRVNTEITKAPLSASMIKRYDEHHQDLTLLKALVRQQLPEKYKEIFFDQSKNGYAGYIDGGASQEEFYKFIKPILEKMDGTEELLVKLNREDLLRKQRTFDNGSIPHQIHLGELHAILRRQEDFYPFLKDNREKIEKILTFRIPYYVGPLARGNSRFAWMTRKSEETITPWNFEEVVDKGASAQSFIERMTNFDKNLPNEKVLPKHSLLYEYFTVYNELTKVKYVTEGMRKPAFLSGEQKKAIVDLLFKTNRKVTVKQLKEDYFKKIECFDSVEISGVEDRFNASLGTYHDLLKIIKDKDFLDNEENEDILEDIVLTLTLFEDREMIEERLKTYAHLFDDKVMKQLKRRRYTGWGRLSRKLINGIRDKQSGKTILDFLKSDGFANRNFMQLIHDDSLTFKEDIQKAQVSGQGDSLHEHIANLAGSPAIKKGILQTVKVVDELVKVMGRHKPENIVIEMARENQTTQKGQKNSRERMKRIEEGIKELGSQILKEHPVENTQLQNEKLYLYYLQNGRDMYVDQELDINRLSDYDVDHIVPQSFLKDDSIDNKVLTRSDKARGKSDNVPSEEVVKKMKNYWRQLLNAKLITQRKFDNLTKAERGGLSELDKAGFIKRQLVETRQITKHVAQILDSRMNTKYDENDKLIREVKVITLKSKLVSDFRKDFQFYKVREINNYHHAHDAYLNAVVGTALIKKYPKLESEFVYGDYKVYDVRKMIAKSEQEIGKATAKYFFYSNIMNFFKTEITLANGEIRKRPLIETNGETGEIVWDKGRDFATVRKVLSMPQVNIVKKTEVQTGGFSKESILPKRNSDKLIARKKDWDPKKYGGFDSPTVAYSVLVVAKVEKGKSKKLKSVKELLGITIMERSSFEKNPIDFLEAKGYKEVKKDLIIKLPKYSLFELENGRKRMLASAGELQKGNELALPSKYVNFLYLASHYEKLKGSPEDNEQKQLFVEQHKHYLDEIIEQISEFSKRVILADANLDKVLSAYNKHRDKPIREQAENIIHLFTLTNLGAPAAFKYFDTTIDRKRYTSTKEVLDATLIHQSITGLYETRIDLSQLGGDGGEAAAKPAPGGGGGTLNIEDEYRLHETSKEPDVPLGSTWLSDFPQAWAETGGMGLAVRQAPLIIPLKATSTPVSIKQYPMSQEARLGIKPHIQRLLDQGILVPCQSPWNTPLLPVKKPGTNDYRPVQDLREVNKRVEDIHPTVPNPYNLLSGLPPSHQWYTVLDLKDAFFCLRLHPTSQPLFAFEWRDPEMGISGQLTWTRLPQGFKNSPTLFNEALHRDLADFRIQHPDLILLQYVDDLLLAATSEQDCQRGTRALLQTLGNLGYRASAKKAQICQKQVKYLGYLLKEGQRWLTEARKETVMGQPTPKTPRQLREFLGTAGFCRLWIPGFAEMAAPLYPLTKPGTLFNWGPDQQKAYQEIKQALLTAPALGLPDLTKPFELFVDEKQGYAKGVLTQKLGPWRRPVAYLSKKLDPVAAGWPPCLRMVAAIAVLTKDAGKLTMGQPLVILAPHAVEALVKQPPDRWLSNARMTHYQAMLLDTDRVQFGPVVALNPATLLPLPEKEAPHDCLEILAETHGTRPDLTDQPIPDADYTWYTDGSSFLQEGQRRAGAAVTTETEVIWARALPAGTSAQRAELIALTQALKMAEGKKLNVYTDSRYAFATAHVHGEIYRRRGWLTSEGREIKNKNEILALLKALFLPKRLSIIHCPGHQKGNSAEARGNRMADQAAREAAMKAVLETSTLLAGKRTADGSEFEKRTADGSEFESPKKKAKVE

SEQ ID NO: 7523 - protein, 2096 aa, synthetic construct
MPAAKRVKLDGGDKKYSIGLDIGTNSVGWAVITDEYKVPSKKFKVLGNTDRHSIKKNLIGALLFDSGETAEATRLKRTARRRYTRRKNRICYLQEIFSNEMAKVDDSFFHRLEESFLVEEDKKHERHPIFGNIVDEVAYHEKYPTIYHLRKKLVDSTDKADLRLIYLALAHMIKFRGHFLIEGDLNPDNSDVDKLFIQLVQTYNQLFEENPINASGVDAKAILSARLSKSRRLENLIAQLPGEKKNGLFGNLIALSLGLTPNFKSNFDLAEDAKLQLSKDTYDDDLDNLLAQIGDQYADLFLAAKNLSDAILLSDILRVNTEITKAPLSASMIKRYDEHHQDLTLLKALVRQQLPEKYKEIFFDQSKNGYAGYIDGGASQEEFYKFIKPILEKMDGTEELLVKLNREDLLRKQRTFDNGSIPHQIHLGELHAILRRQEDFYPFLKDNREKIEKILTFRIPYYVGPLARGNSRFAWMTRKSEETITPWNFEEVVDKGASAQSFIERMTNFDKNLPNEKVLPKHSLLYEYFTVYNELTKVKYVTEGMRKPAFLSGEQKKAIVDLLFKTNRKVTVKQLKEDYFKKIECFDSVEISGVEDRFNASLGTYHDLLKIIKDKDFLDNEENEDILEDIVLTLTLFEDREMIEERLKTYAHLFDDKVMKQLKRRRYTGWGRLSRKLINGIRDKQSGKTILDFLKSDGFANRNFMQLIHDDSLTFKEDIQKAQVSGQGDSLHEHIANLAGSPAIKKGILQTVKVVDELVKVMGRHKPENIVIEMARENQTTQKGQKNSRERMKRIEEGIKELGSQILKEHPVENTQLQNEKLYLYYLQNGRDMYVDQELDINRLSDYDVDHIVPQSFLKDDSIDNKVLTRSDKARGKSDNVPSEEVVKKMKNYWRQLLNAKLITQRKFDNLTKAERGGLSELDKAGFIKRQLVETRQITKHVAQILDSRMNTKYDENDKLIREVKVITLKSKLVSDFRKDFQFYKVREINNYHHAHDAYLNAVVGTALIKKYPKLESEFVYGDYKVYDVRKMIAKSEQEIGKATAKYFFYSNIMNFFKTEITLANGEIRKRPLIETNGETGEIVWDKGRDFATVRKVLSMPQVNIVKKTEVQTGGFSKESILPKRNSDKLIARKKDWDPKKYGGFDSPTVAYSVLVVAKVEKGKSKKLKSVKELLGITIMERSSFEKNPIDFLEAKGYKEVKKDLIIKLPKYSLFELENGRKRMLASAGELQKGNELALPSKYVNFLYLASHYEKLKGSPEDNEQKQLFVEQHKHYLDEIIEQISEFSKRVILADANLDKVLSAYNKHRDKPIREQAENIIHLFTLTNLGAPAAFKYFDTTIDRKRYTSTKEVLDATLIHQSITGLYETRIDLSQLGGDGGEAAAKPAPGGGGGTLNIEDEYRLHETSKEPDVPLGSTWLSDFPQAWAETGGMGLAVRQAPLIIPLKATSTPVSIKQYPMSQEARLGIKPHIQRLLDQGILVPCQSPWNTPLLPVKKPGTNDYRPVQDLREVNKRVEDIHPTVPNPYNLLSGLPPSHQWYTVLDLKDAFFCLRLHPTSQPLFAFEWRDPEMGISGQLTWTRLPQGFKNSPTLFNEALHRDLADFRIQHPDLILLQYVDDLLLAATSEQDCQRGTRALLQTLGNLGYRASAKKAQICQKQVKYLGYLLKEGQRWLTEARKETVMGQPTPKTPRQLREFLGKAGFCRLFIPGFAEMAAPLYPLTKPGTLFNWGPDQQKAYQEIKQALLTAPALGLPDLTKPFELFVDEKQGYAKGVLTQKLGPWRRPVAYLSKKLDPVAAGWPPCLRMVAAIAVLTKDAGKLTMGQPLVILAPHAVEALVKQPPDRWLSNARMTHYQAMLLDTDRVQFGPVVALNPATLLPLPEKEAPHDCLEILAETHGTRPDLTDQPIPDADYTWYTDGSSFLQEGQRRAGAAVTTETEVIWARALPAGTSAQRAELIALTQALKMAEGKKLNVYTDSRYAFATAHVHGEIYRRRGWLTSEGREIKNKNEILALLKALFLPKRLSIIHCPGHQKGNSAEARGNRMADQAAREAAMKAVLETSTLLAGKRTADGSEFEKRTADGSEFESPKKKAKVE

SEQ ID NO: 7524 - protein, 2098 aa, synthetic construct
MPAAKRVKLDGGDKKYSIGLDIGTNSVGWAVITDEYKVPSKKFKVLGNTDRHSIKKNLIGALLFDSGETAEATRLKRTARRRYTRRKNRICYLQEIFSNEMAKVDDSFFHRLEESFLVEEDKKHERHPIFGNIVDEVAYHEKYPTIYHLRKKLVDSTDKADLRLIYLALAHMIKFRGHFLIEGDLNPDNSDVDKLFIQLVQTYNQLFEENPINASGVDAKAILSARLSKSRRLENLIAQLPGEKKNGLFGNLIALSLGLTPNFKSNFDLAEDAKLQLSKDTYDDDLDNLLAQIGDQYADLFLAAKNLSDAILLSDILRVNTEITKAPLSASMIKRYDEHHQDLTLLKALVRQQLPEKYKEIFFDQSKNGYAGYIDGGASQEEFYKFIKPILEKMDGTEELLVKLNREDLLRKQRTFDNGSIPHQIHLGELHAILRRQEDFYPFLKDNREKIEKILTFRIPYYVGPLARGNSRFAWMTRKSEETITPWNFEEVVDKGASAQSFIERMTNFDKNLPNEKVLPKHSLLYEYFTVYNELTKVKYVTEGMRKPAFLSGEQKKAIVDLLFKTNRKVTVKQLKEDYFKKIECFDSVEISGVEDRFNASLGTYHDLLKIIKDKDFLDNEENEDILEDIVLTLTLFEDREMIEERLKTYAHLFDDKVMKQLKRRRYTGWGRLSRKLINGIRDKQSGKTILDFLKSDGFANRNFMQLIHDDSLTFKEDIQKAQVSGQGDSLHEHIANLAGSPAIKKGILQTVKVVDELVKVMGRHKPENIVIEMARENQTTQKGQKNSRERMKRIEEGIKELGSQILKEHPVENTQLQNEKLYLYYLQNGRDMYVDQELDINRLSDYDVDHIVPQSFLKDDSIDNKVLTRSDKARGKSDNVPSEEVVKKMKNYWRQLLNAKLITQRKFDNLTKAERGGLSELDKAGFIKRQLVETRQITKHVAQILDSRMNTKYDENDKLIREVKVITLKSKLVSDFRKDFQFYKVREINNYHHAHDAYLNAVVGTALIKKYPKLESEFVYGDYKVYDVRKMIAKSEQEIGKATAKYFFYSNIMNFFKTEITLANGEIRKRPLIETNGETGEIVWDKGRDFATVRKVLSMPQVNIVKKTEVQTGGFSKESILPKRNSDKLIARKKDWDPKKYGGFDSPTVAYSVLVVAKVEKGKSKKLKSVKELLGITIMERSSFEKNPIDFLEAKGYKEVKKDLIIKLPKYSLFELENGRKRMLASAGELQKGNELALPSKYVNFLYLASHYEKLKGSPEDNEQKQLFVEQHKHYLDEIIEQISEFSKRVILADANLDKVLSAYNKHRDKPIREQAENIIHLFTLTNLGAPAAFKYFDTTIDRKRYTSTKEVLDATLIHQSITGLYETRIDLSQLGGDGGPAPGGGEAAAKGGTAPLEEEYRLFLEAPIQNVTLLEQWKREIPKVWAEINPPGLASTQAPIHVQLLSTALPVRVRQYPITLEAKRSLRETIRKFRAAGILRPVHSPWNTPLLPVRKSGTSEYRMVQDLREVNKRVETIHPTVPNPYTLLSLLPPDRIWYSVLDLKDAFFCIPLAPESQLIFAFEWADAEEGESGQLTWTRLPQGFKNSPTLFDEALNRDLQGFRLDHPSVSLLQYVDDLLIAADTQAACLSATRDLLMTLAELGYRVSGKKAQLCQEEVTYLGFKIHKGSRSLSNSRTQAILQIPVPKTKRQVREFLGTIGYCRLWIPGFAELAQPLYAATRGGNDPLVWGEKEEEAFQSLKLALTQPPALALPSLDKPFQLFVEETSGAAKGVLTQALGPWKRPVAYLSKRLDPVAAGWPRCLRAIAAAALLTREASKLTFGQDIEITSSHNLESLLRSPPDKWLTNARITQYQVLLLDPPRVRFKQTAALNPATLLPETDDTLPIHHCLDTLDSLTSTRPDLTDQPLAQAEATLFTDGSSYIRDGKRYAGAAVVTLDSVIWAEPLPIGTSAQKAELIALTKALEWSKDKSVNIYTDSRYAFATLHVHGMIYRERGLLTAGGKAIKNAPEILALLTAVWLPKRVAVMHCKGHQKDDAPTSTGNRRADEVAREVAIRPLSTQATISAGKRTADGSEFEKRTADGSEFESPKKKAKVE

SEQ ID NO: 7525 - protein, 2098 aa, synthetic construct
MPAAKRVKLDGGDKKYSIGLDIGTNSVGWAVITDEYKVPSKKFKVLGNTDRHSIKKNLIGALLFDSGETAEATRLKRTARRRYTRRKNRICYLQEIFSNEMAKVDDSFFHRLEESFLVEEDKKHERHPIFGNIVDEVAYHEKYPTIYHLRKKLVDSTDKADLRLIYLALAHMIKFRGHFLIEGDLNPDNSDVDKLFIQLVQTYNQLFEENPINASGVDAKAILSARLSKSRRLENLIAQLPGEKKNGLFGNLIALSLGLTPNFKSNFDLAEDAKLQLSKDTYDDDLDNLLAQIGDQYADLFLAAKNLSDAILLSDILRVNTEITKAPLSASMIKRYDEHHQDLTLLKALVRQQLPEKYKEIFFDQSKNGYAGYIDGGASQEEFYKFIKPILEKMDGTEELLVKLNREDLLRKQRTFDNGSIPHQIHLGELHAILRRQEDFYPFLKDNREKIEKILTFRIPYYVGPLARGNSRFAWMTRKSEETITPWNFEEVVDKGASAQSFIERMTNFDKNLPNEKVLPKHSLLYEYFTVYNELTKVKYVTEGMRKPAFLSGEQKKAIVDLLFKTNRKVTVKQLKEDYFKKIECFDSVEISGVEDRFNASLGTYHDLLKIIKDKDFLDNEENEDILEDIVLTLTLFEDREMIEERLKTYAHLFDDKVMKQLKRRRYTGWGRLSRKLINGIRDKQSGKTILDFLKSDGFANRNFMQLIHDDSLTFKEDIQKAQVSGQGDSLHEHIANLAGSPAIKKGILQTVKVVDELVKVMGRHKPENIVIEMARENQTTQKGQKNSRERMKRIEEGIKELGSQILKEHPVENTQLQNEKLYLYYLQNGRDMYVDQELDINRLSDYDVDHIVPQSFLKDDSIDNKVLTRSDKARGKSDNVPSEEVVKKMKNYWRQLLNAKLITQRKFDNLTKAERGGLSELDKAGFIKRQLVETRQITKHVAQILDSRMNTKYDENDKLIREVKVITLKSKLVSDFRKDFQFYKVREINNYHHAHDAYLNAVVGTALIKKYPKLESEFVYGDYKVYDVRKMIAKSEQEIGKATAKYFFYSNIMNFFKTEITLANGEIRKRPLIETNGETGEIVWDKGRDFATVRKVLSMPQVNIVKKTEVQTGGFSKESILPKRNSDKLIARKKDWDPKKYGGFDSPTVAYSVLVVAKVEKGKSKKLKSVKELLGITIMERSSFEKNPIDFLEAKGYKEVKKDLIIKLPKYSLFELENGRKRMLASAGELQKGNELALPSKYVNFLYLASHYEKLKGSPEDNEQKQLFVEQHKHYLDEIIEQISEFSKRVILADANLDKVLSAYNKHRDKPIREQAENIIHLFTLTNLGAPAAFKYFDTTIDRKRYTSTKEVLDATLIHQSITGLYETRIDLSQLGGDGGPAPGGGEAAAKGGTAPLEEEYRLFLEAPIQNVTLLEQWKREIPKVWAEINPPGLASTQAPIHVQLLSTALPVRVRQYPITLEAKRSLRETIRKFRAAGILRPVHSPWNTPLLPVRKSGTSEYRMVQDLREVNKRVETIHPTVPNPYTLLSLLPPDRIWYSVLDLKDAFFCIPLAPESQLIFAFEWADAEEGESGQLTWTRLPQGFKNSPTLFNEALNRDLQGFRLDHPSVSLLQYVDDLLIAADTQAACLSATRDLLMTLAELGYRVSGKKAQLCQEEVTYLGFKIHKGSRSLSNSRTQAILQIPVPKTKRQVREFLGTIGYCRLWIPGFAELAQPLYAATRPGNDPLVWGEKEEEAFQSLKLALTQPPALALPSLDKPFQLFVEETSGAAKGVLTQALGPWKRPVAYLSKRLDPVAAGWPRCLRAIAAAALLTREASKLTFGQDIEITSSHNLESLLRSPPDKWLTNARITQYQVLLLDPPRVRFKQTAALNPATLLPETDDTLPIHHCLDTLDSLTSTRPDLTDQPLAQAEATLFTDGSSYIRDGKRYAGAAVVTLDSVIWAEPLPIGTSAQKAELIALTKALEWSKDKSVNIYTDSRYAFATLHVHGMIYRERGWLTAGGKAIKNAPEILALLTAVWLPKRVAVMHCKGHQKDDAPTSTGNRRADEVAREVAIRPLSTQATISAGKRTADGSEFEKRTADGSEFESPKKKAKVE

SEQ ID NO: 7526 - protein, 2098 aa, synthetic construct
MPAAKRVKLDGGDKKYSIGLDIGTNSVGWAVITDEYKVPSKKFKVLGNTDRHSIKKNLIGALLFDSGETAEATRLKRTARRRYTRRKNRICYLQEIFSNEMAKVDDSFFHRLEESFLVEEDKKHERHPIFGNIVDEVAYHEKYPTIYHLRKKLVDSTDKADLRLIYLALAHMIKFRGHFLIEGDLNPDNSDVDKLFIQLVQTYNQLFEENPINASGVDAKAILSARLSKSRRLENLIAQLPGEKKNGLFGNLIALSLGLTPNFKSNFDLAEDAKLQLSKDTYDDDLDNLLAQIGDQYADLFLAAKNLSDAILLSDILRVNTEITKAPLSASMIKRYDEHHQDLTLLKALVRQQLPEKYKEIFFDQSKNGYAGYIDGGASQEEFYKFIKPILEKMDGTEELLVKLNREDLLRKQRTFDNGSIPHQIHLGELHAILRRQEDFYPFLKDNREKIEKILTFRIPYYVGPLARGNSRFAWMTRKSEETITPWNFEEVVDKGASAQSFIERMTNFDKNLPNEKVLPKHSLLYEYFTVYNELTKVKYVTEGMRKPAFLSGEQKKAIVDLLFKTNRKVTVKQLKEDYFKKIECFDSVEISGVEDRFNASLGTYHDLLKIIKDKDFLDNEENEDILEDIVLTLTLFEDREMIEERLKTYAHLFDDKVMKQLKRRRYTGWGRLSRKLINGIRDKQSGKTILDFLKSDGFANRNFMQLIHDDSLTFKEDIQKAQVSGQGDSLHEHIANLAGSPAIKKGILQTVKVVDELVKVMGRHKPENIVIEMARENQTTQKGQKNSRERMKRIEEGIKELGSQILKEHPVENTQLQNEKLYLYYLQNGRDMYVDQELDINRLSDYDVDHIVPQSFLKDDSIDNKVLTRSDKARGKSDNVPSEEVVKKMKNYWRQLLNAKLITQRKFDNLTKAERGGLSELDKAGFIKRQLVETRQITKHVAQILDSRMNTKYDENDKLIREVKVITLKSKLVSDFRKDFQFYKVREINNYHHAHDAYLNAVVGTALIKKYPKLESEFVYGDYKVYDVRKMIAKSEQEIGKATAKYFFYSNIMNFFKTEITLANGEIRKRPLIETNGETGEIVWDKGRDFATVRKVLSMPQVNIVKKTEVQTGGFSKESILPKRNSDKLIARKKDWDPKKYGGFDSPTVAYSVLVVAKVEKGKSKKLKSVKELLGITIMERSSFEKNPIDFLEAKGYKEVKKDLIIKLPKYSLFELENGRKRMLASAGELQKGNELALPSKYVNFLYLASHYEKLKGSPEDNEQKQLFVEQHKHYLDEIIEQISEFSKRVILADANLDKVLSAYNKHRDKPIREQAENIIHLFTLTNLGAPAAFKYFDTTIDRKRYTSTKEVLDATLIHQSITGLYETRIDLSQLGGDGGPAPGGGEAAAKGGTAPLEEEYRLFLEAPIQNVTLLEQWKREIPKVWAEINPPGLASTQAPIHVQLLSTALPVRVRQYPITLEAKRSLRETIRKFRAAGILRPVHSPWNTPLLPVRKSGTSEYRMVQDLREVNKRVETIHPTVPNPYTLLSLLPPDRIWYSVLDLKDAFFCIPLAPESQLIFAFEWADAEEGESGQLTWTRLPQGFKNSPTLFNEALNRDLQGFRLDHPSVSLLQYVDDLLIAADTQAACLSATRDLLMTLAELGYRVSGKKAQLCQEEVTYLGFKIHKGSRSLSNSRTQAILQIPVPKTKRQVREFLGKIGYCRLFIPGFAELAQPLYAATRPGNDPLVWGEKEEEAFQSLKLALTQPPALALPSLDKPFQLFVEETSGAAKGVLTQALGPWKRPVAYLSKRLDPVAAGWPRCLRAIAAAALLTREASKLTFGQDIEITSSHNLESLLRSPPDKWLTNARITQYQVLLLDPPRVRFKQTAALNPATLLPETDDTLPIHHCLDTLDSLTSTRPDLTDQPLAQAEATLFTDGSSYIRDGKRYAGAAVVTLDSVIWAEPLPIGTSAQKAELIALTKALEWSKDKSVNIYTDSRYAFATLHVHGMIYRERGWLTAGGKAIKNAPEILALLTAVWLPKRVAVMHCKGHQKDDAPTSTGNRRADEVAREVAIRPLSTQATISAGKRTADGSEFEKRTADGSEFESPKKKAKVE

SEQ ID NO: 7527 - protein, 2173 aa, synthetic construct
MPAAKRVKLDGGDKKYSIGLDIGTNSVGWAVITDEYKVPSKKFKVLGNTDRHSIKKNLIGALLFDSGETAEATRLKRTARRRYTRRKNRICYLQEIFSNEMAKVDDSFFHRLEESFLVEEDKKHERHPIFGNIVDEVAYHEKYPTIYHLRKKLVDSTDKADLRLIYLALAHMIKFRGHFLIEGDLNPDNSDVDKLFIQLVQTYNQLFEENPINASGVDAKAILSARLSKSRRLENLIAQLPGEKKNGLFGNLIALSLGLTPNFKSNFDLAEDAKLQLSKDTYDDDLDNLLAQIGDQYADLFLAAKNLSDAILLSDILRVNTEITKAPLSASMIKRYDEHHQDLTLLKALVRQQLPEKYKEIFFDQSKNGYAGYIDGGASQEEFYKFIKPILEKMDGTEELLVKLNREDLLRKQRTFDNGSIPHQIHLGELHAILRRQEDFYPFLKDNREKIEKILTFRIPYYVGPLARGNSRFAWMTRKSEETITPWNFEEVVDKGASAQSFIERMTNFDKNLPNEKVLPKHSLLYEYFTVYNELTKVKYVTEGMRKPAFLSGEQKKAIVDLLFKTNRKVTVKQLKEDYFKKIECFDSVEISGVEDRFNASLGTYHDLLKIIKDKDFLDNEENEDILEDIVLTLTLFEDREMIEERLKTYAHLFDDKVMKQLKRRRYTGWGRLSRKLINGIRDKQSGKTILDFLKSDGFANRNFMQLIHDDSLTFKEDIQKAQVSGQGDSLHEHIANLAGSPAIKKGILQTVKVVDELVKVMGRHKPENIVIEMARENQTTQKGQKNSRERMKRIEEGIKELGSQILKEHPVENTQLQNEKLYLYYLQNGRDMYVDQELDINRLSDYDVDHIVPQSFLKDDSIDNKVLTRSDKARGKSDNVPSEEVVKKMKNYWRQLLNAKLITQRKFDNLTKAERGGLSELDKAGFIKRQLVETRQITKHVAQILDSRMNTKYDENDKLIREVKVITLKSKLVSDFRKDFQFYKVREINNYHHAHDAYLNAVVGTALIKKYPKLESEFVYGDYKVYDVRKMIAKSEQEIGKATAKYFFYSNIMNFFKTEITLANGEIRKRPLIETNGETGEIVWDKGRDFATVRKVLSMPQVNIVKKTEVQTGGFSKESILPKRNSDKLIARKKDWDPKKYGGFDSPTVAYSVLVVAKVEKGKSKKLKSVKELLGITIMERSSFEKNPIDFLEAKGYKEVKKDLIIKLPKYSLFELENGRKRMLASAGELQKGNELALPSKYVNFLYLASHYEKLKGSPEDNEQKQLFVEQHKHYLDEIIEQISEFSKRVILADANLDKVLSAYNKHRDKPIREQAENIIHLFTLTNLGAPAAFKYFDTTIDRKRYTSTKEVLDATLIHQSITGLYETRIDLSQLGGDGGPAPGGGEAAAKGGMDLLKPLTVERKGVKIKGYWNSQADITCVPKDLLQGEEPVRQQNVTTIHGTQEGDVYYVNLKIDGRRINTEVIGTTLDYAIITPGDVPWILKKPLELTIKLDLEEQQGTLLNNSILSKKGKEELKQLFEKYSALWQSWENQVGHRRIRPHKIATGTVKPTPQKQYHINPKAKPDIQIVINDLLKQGVLIQKESTMNTPVYPVPKPNGRWRMVLDYRAVNKVTPLIAVQNQHSYGILGSLFKGRYKTTIDLSNGFWAHPIVPEDYWITAFTWQGKQYCWTVLPQGFLNSPGLFTGDVVDLLQGIPNVEVYVDDVYISHDSEKEHLEYLDILFNRLKEAGYIISLKKSNIANSIVDFLGFQITNEGRGLTDTFKEKLENITAPTTLKQLQSILGLLNFARNFIPDFTELIAPLYALIPKSTKNYVPWQIEHSTTLETLITKLNGAEYLQGRKGDKTLIMKVNASYTTGYIRYYNEGEKKPISYVSIVFSKTELKFTELEKLLTTVHKGLLKALDLSMGQNIHVYSPIVSMQNIQKTPQTAKKALASRWLSWLSYLEDPRIRFFYDPQMPALKDLPAVDTGKDNKKHPSNFQHIFYTDGSAITSPTKEGHLNAGMGIVYFINKDGNLQKQQEWSISLGNHTAQFAEIAAFEFALKKCLPLGGNILVVTDSNYVAKAYNEELDVWASNGFVNNRKKPLKHISKWKSVADLKRLRPDVVVTHEPGHQKLDSSPHAYGNNLADQLATQASFKVHAGKRTADGSEFEKRTADGSEFESPKKKAKVE

SEQ ID NO: 7528 - protein, 2095 aa, synthetic construct
MPAAKRVKLDGGDKKYSIGLDIGTNSVGWAVITDEYKVPSKKFKVLGNTDRHSIKKNLIGALLFDSGETAEATRLKRTARRRYTRRKNRICYLQEIFSNEMAKVDDSFFHRLEESFLVEEDKKHERHPIFGNIVDEVAYHEKYPTIYHLRKKLVDSTDKADLRLIYLALAHMIKFRGHFLIEGDLNPDNSDVDKLFIQLVQTYNQLFEENPINASGVDAKAILSARLSKSRRLENLIAQLPGEKKNGLFGNLIALSLGLTPNFKSNFDLAEDAKLQLSKDTYDDDLDNLLAQIGDQYADLFLAAKNLSDAILLSDILRVNTEITKAPLSASMIKRYDEHHQDLTLLKALVRQQLPEKYKEIFFDQSKNGYAGYIDGGASQEEFYKFIKPILEKMDGTEELLVKLNREDLLRKQRTFDNGSIPHQIHLGELHAILRRQEDFYPFLKDNREKIEKILTFRIPYYVGPLARGNSRFAWMTRKSEETITPWNFEEVVDKGASAQSFIERMTNFDKNLPNEKVLPKHSLLYEYFTVYNELTKVKYVTEGMRKPAFLSGEQKKAIVDLLFKTNRKVTVKQLKEDYFKKIECFDSVEISGVEDRFNASLGTYHDLLKIIKDKDFLDNEENEDILEDIVLTLTLFEDREMIEERLKTYAHLFDDKVMKQLKRRRYTGWGRLSRKLINGIRDKQSGKTILDFLKSDGFANRNFMQLIHDDSLTFKEDIQKAQVSGQGDSLHEHIANLAGSPAIKKGILQTVKVVDELVKVMGRHKPENIVIEMARENQTTQKGQKNSRERMKRIEEGIKELGSQILKEHPVENTQLQNEKLYLYYLQNGRDMYVDQELDINRLSDYDVDHIVPQSFLKDDSIDNKVLTRSDKARGKSDNVPSEEVVKKMKNYWRQLLNAKLITQRKFDNLTKAERGGLSELDKAGFIKRQLVETRQITKHVAQILDSRMNTKYDENDKLIREVKVITLKSKLVSDFRKDFQFYKVREINNYHHAHDAYLNAVVGTALIKKYPKLESEFVYGDYKVYDVRKMIAKSEQEIGKATAKYFFYSNIMNFFKTEITLANGEIRKRPLIETNGETGEIVWDKGRDFATVRKVLSMPQVNIVKKTEVQTGGFSKESILPKRNSDKLIARKKDWDPKKYGGFDSPTVAYSVLVVAKVEKGKSKKLKSVKELLGITIMERSSFEKNPIDFLEAKGYKEVKKDLIIKLPKYSLFELENGRKRMLASAGELQKGNELALPSKYVNFLYLASHYEKLKGSPEDNEQKQLFVEQHKHYLDEIIEQISEFSKRVILADANLDKVLSAYNKHRDKPIREQAENIIHLFTLTNLGAPAAFKYFDTTIDRKRYTSTKEVLDATLIHQSITGLYETRIDLSQLGGDGGPAPGGGEAAAKGGTLQLEEEYRLFEPESTQKQEMDIWLKNFPQAWAETGGMGTAHCQAPVLIQLKATATPISIRQYPMPHEAYQGIKPHIRRMLDQGILKPCQSPWNTPLLPVKKPGTEDYRPVQDLREVNKRVEDIHPTVPNPYNLLSTLPPSHPWYTVLDLKDAFFCLRLHSESQLLFAFEWRDPEIGLSGQLTWTRLPQGFKNSPTLFNEALHSDLADFRVRYPALVLLQYVDDLLLAAATRTECLEGTKALLETLGNKGYRASAKKAQICLQEVTYLGYSLKDGQRWLTKARKEAILSIPVPKNSRQVREFLGTAGYCRLWIPGFAELAAPLYPLTRPGTLFQWGTEQQLAFEDIKKALLSSPALGLPDITKPFELFIDENSGFAKGVLVQKLGPWKRPVAYLSKKLDTVASGWPPCLRMVAAIAILVKDAGKLTLGQPLTILTSHPVEALVRQPPNKWLSNARMTHYQAMLLDAERVHFGPTVSLNPATLLPLPSGGNHHDCLQILAETHGTRPDLTDQPLPDADLTWYTDGSSFIRNGEREAGAAVTTESEVIWAAPLPPGTSAQRAELIALTQALKMAEGKKLTVYTDSRYAFATTHVHGEIYRRRGWLTSEGKEIKNKNEILALLEALFLPKRLSIIHCPGHQKGDSPQAKGNRLADDTAKKAATETHSSLTVLPAGKRTADGSEFEKRTADGSEFESPKKKAKVE

SEQ ID NO: 7529 - protein, 2094 aa, synthetic construct
MPAAKRVKLDGGDKKYSIGLDIGTNSVGWAVITDEYKVPSKKFKVLGNTDRHSIKKNLIGALLFDSGETAEATRLKRTARRRYTRRKNRICYLQEIFSNEMAKVDDSFFHRLEESFLVEEDKKHERHPIFGNIVDEVAYHEKYPTIYHLRKKLVDSTDKADLRLIYLALAHMIKFRGHFLIEGDLNPDNSDVDKLFIQLVQTYNQLFEENPINASGVDAKAILSARLSKSRRLENLIAQLPGEKKNGLFGNLIALSLGLTPNFKSNFDLAEDAKLQLSKDTYDDDLDNLLAQIGDQYADLFLAAKNLSDAILLSDILRVNTEITKAPLSASMIKRYDEHHQDLTLLKALVRQQLPEKYKEIFFDQSKNGYAGYIDGGASQEEFYKFIKPILEKMDGTEELLVKLNREDLLRKQRTFDNGSIPHQIHLGELHAILRRQEDFYPFLKDNREKIEKILTFRIPYYVGPLARGNSRFAWMTRKSEETITPWNFEEVVDKGASAQSFIERMTNFDKNLPNEKVLPKHSLLYEYFTVYNELTKVKYVTEGMRKPAFLSGEQKKAIVDLLFKTNRKVTVKQLKEDYFKKIECFDSVEISGVEDRFNASLGTYHDLLKIIKDKDFLDNEENEDILEDIVLTLTLFEDREMIEERLKTYAHLFDDKVMKQLKRRRYTGWGRLSRKLINGIRDKQSGKTILDFLKSDGFANRNFMQLIHDDSLTFKEDIQKAQVSGQGDSLHEHIANLAGSPAIKKGILQTVKVVDELVKVMGRHKPENIVIEMARENQTTQKGQKNSRERMKRIEEGIKELGSQILKEHPVENTQLQNEKLYLYYLQNGRDMYVDQELDINRLSDYDVDHIVPQSFLKDDSIDNKVLTRSDKARGKSDNVPSEEVVKKMKNYWRQLLNAKLITQRKFDNLTKAERGGLSELDKAGFIKRQLVETRQITKHVAQILDSRMNTKYDENDKLIREVKVITLKSKLVSDFRKDFQFYKVREINNYHHAHDAYLNAVVGTALIKKYPKLESEFVYGDYKVYDVRKMIAKSEQEIGKATAKYFFYSNIMNFFKTEITLANGEIRKRPLIETNGETGEIVWDKGRDFATVRKVLSMPQVNIVKKTEVQTGGFSKESILPKRNSDKLIARKKDWDPKKYGGFDSPTVAYSVLVVAKVEKGKSKKLKSVKELLGITIMERSSFEKNPIDFLEAKGYKEVKKDLIIKLPKYSLFELENGRKRMLASAGELQKGNELALPSKYVNFLYLASHYEKLKGSPEDNEQKQLFVEQHKHYLDEIIEQISEFSKRVILADANLDKVLSAYNKHRDKPIREQAENIIHLFTLTNLGAPAAFKYFDTTIDRKRYTSTKEVLDATLIHQSITGLYETRIDLSQLGGDGGPAPGGGEAAAKGGVLNLEEEYRLHEKPVPSSIDPSWLQLFPTVWAERAGMGLANQVPPVVVELRSGASPVAVRQYPMSKEAREGIRPHIQKFLDLGVLVPCRSPWNTPLLPVKKPGTNDYRPVQDLREINKRVQDIHPTVPNPYNLLSSLPPSYTWYSVLDLKDAFFCLRLHPNSQPLFAFEWKDPEKGNTGQLTWTRLPQGFKNSPTLFNEALHRDLAPFRALNPQVVLLQYVDDLLVAAPTYEDCKKGTQKLLQELSKLGYRVSAKKAQLCQREVTYLGYLLKEGKRWLTPARKATVMKIPVPTTPRQVREFLGTAGFCRLWIPGFASLAAPLYPLTKPSIPFIWTEEHQQAFDHIKKALLSAPALALPDLTKPFTLYIDERAGVARGVLTQTLGPWRRPVAYLSKKLDPVASGWPTCLKAVAAVALLLKDADKLTLGQNVTVIASHSLESIVRQPPDRWMTNARMTHYQSLLLNERVSFAPPAVLNPATLLPVESEATPVHRCSEILAEETGTRRDLEDQPLPGVPTWYTDGSSFITEGKRRAGAPIVDGKRTVWASSLPEGTSAQKAELVALTQALRLAEGKNINIYTDSRYAFATAHIHGAIYKQRGWLTSAGKDIKNKEEILALLEAIHLPRRVAIIHCPGHQRGSNPVATGNRRADEAAKQAALSTRVLAGTTKPAGKRTADGSEFEKRTADGSEFESPKKKAKVE

SEQ ID NO: 7530 - protein, 2127 aa, synthetic construct
MPAAKRVKLDGGDKKYSIGLDIGTNSVGWAVITDEYKVPSKKFKVLGNTDRHSIKKNLIGALLFDSGETAEATRLKRTARRRYTRRKNRICYLQEIFSNEMAKVDDSFFHRLEESFLVEEDKKHERHPIFGNIVDEVAYHEKYPTIYHLRKKLVDSTDKADLRLIYLALAHMIKFRGHFLIEGDLNPDNSDVDKLFIQLVQTYNQLFEENPINASGVDAKAILSARLSKSRRLENLIAQLPGEKKNGLFGNLIALSLGLTPNFKSNFDLAEDAKLQLSKDTYDDDLDNLLAQIGDQYADLFLAAKNLSDAILLSDILRVNTEITKAPLSASMIKRYDEHHQDLTLLKALVRQQLPEKYKEIFFDQSKNGYAGYIDGGASQEEFYKFIKPILEKMDGTEELLVKLNREDLLRKQRTFDNGSIPHQIHLGELHAILRRQEDFYPFLKDNREKIEKILTFRIPYYVGPLARGNSRFAWMTRKSEETITPWNFEEVVDKGASAQSFIERMTNFDKNLPNEKVLPKHSLLYEYFTVYNELTKVKYVTEGMRKPAFLSGEQKKAIVDLLFKTNRKVTVKQLKEDYFKKIECFDSVEISGVEDRFNASLGTYHDLLKIIKDKDFLDNEENEDILEDIVLTLTLFEDREMIEERLKTYAHLFDDKVMKQLKRRRYTGWGRLSRKLINGIRDKQSGKTILDFLKSDGFANRNFMQLIHDDSLTFKEDIQKAQVSGQGDSLHEHIANLAGSPAIKKGILQTVKVVDELVKVMGRHKPENIVIEMARENQTTQKGQKNSRERMKRIEEGIKELGSQILKEHPVENTQLQNEKLYLYYLQNGRDMYVDQELDINRLSDYDVDHIVPQSFLKDDSIDNKVLTRSDKARGKSDNVPSEEVVKKMKNYWRQLLNAKLITQRKFDNLTKAERGGLSELDKAGFIKRQLVETRQITKHVAQILDSRMNTKYDENDKLIREVKVITLKSKLVSDFRKDFQFYKVREINNYHHAHDAYLNAVVGTALIKKYPKLESEFVYGDYKVYDVRKMIAKSEQEIGKATAKYFFYSNIMNFFKTEITLANGEIRKRPLIETNGETGEIVWDKGRDFATVRKVLSMPQVNIVKKTEVQTGGFSKESILPKRNSDKLIARKKDWDPKKYGGFDSPTVAYSVLVVAKVEKGKSKKLKSVKELLGITIMERSSFEKNPIDFLEAKGYKEVKKDLIIKLPKYSLFELENGRKRMLASAGELQKGNELALPSKYVNFLYLASHYEKLKGSPEDNEQKQLFVEQHKHYLDEIIEQISEFSKRVILADANLDKVLSAYNKHRDKPIREQAENIIHLFTLTNLGAPAAFKYFDTTIDRKRYTSTKEVLDATLIHQSITGLYETRIDLSQLGGDGGPAPGGGEAAAKGGLLGRDLLTKLKAQIQFSTEGPQVTWEDRPAMCLVLNLEEEYRLHEKPVPPSIDPSWLQLFPMVWAEKAGMGLANQVPPVVVELKSDASPVAVRQYPMSKEAREGIRPHIQRFLDLGILVPCQSPWNTPLLPVKKPGTNDYRPVQDLREVNKRVQDIHPTVPNPYNLLSSLPPSHTWYSVLDLKDAFFCLKLHPNSQPLFAFEWRDPEKGNTGQLTWTRLPQGFKNSPTLFNEALHRDLASFRALNPQVVMLQYVDDLLVAAPTYRDCKEGTRRLLQELSKLGYRVSAKKAQLCREEVTYLGYLLKGGKRWLTPARKATVMKIPTPTTPRQVREFLGTAGFCRLWIPGFASLAAPLYPLTRPKVPFTWTEAHQEAFGRIKEALLSAPALALPDLTKPFALYVDEKEGVARGVLTQTLGPWRRPVAYLSKKLDPVASGWPTCLKAIAAVALLLKDADKLTLGQNVLVIAPHNLESIVRQPPDRWMTNARMTHYQSLLLNERVSFAPPAILNPATLLPVESDDTPIHICSEILAEETGTRPDLRDQPLPGVPAWYTDGSSFIMDGRRQAGAAIVDNKRTVWASNLPEGTSAQKAELIALTQALRLAEGKSINIYTDSRYAFATAHVHGAIYKQRGWLTSAGKDIKNKEEILALLEAIHLPKRVAIIHCPGHQRGTDPVATGNRKADEAAKQAAQSTRILTETTKNAGKRTADGSEFEKRTADGSEFESPKKKAKVE

SEQ ID NO: 7531 - protein, 2127 aa, synthetic construct
MPAAKRVKLDGGDKKYSIGLDIGTNSVGWAVITDEYKVPSKKFKVLGNTDRHSIKKNLIGALLFDSGETAEATRLKRTARRRYTRRKNRICYLQEIFSNEMAKVDDSFFHRLEESFLVEEDKKHERHPIFGNIVDEVAYHEKYPTIYHLRKKLVDSTDKADLRLIYLALAHMIKFRGHFLIEGDLNPDNSDVDKLFIQLVQTYNQLFEENPINASGVDAKAILSARLSKSRRLENLIAQLPGEKKNGLFGNLIALSLGLTPNFKSNFDLAEDAKLQLSKDTYDDDLDNLLAQIGDQYADLFLAAKNLSDAILLSDILRVNTEITKAPLSASMIKRYDEHHQDLTLLKALVRQQLPEKYKEIFFDQSKNGYAGYIDGGASQEEFYKFIKPILEKMDGTEELLVKLNREDLLRKQRTFDNGSIPHQIHLGELHAILRRQEDFYPFLKDNREKIEKILTFRIPYYVGPLARGNSRFAWMTRKSEETITPWNFEEVVDKGASAQSFIERMTNFDKNLPNEKVLPKHSLLYEYFTVYNELTKVKYVTEGMRKPAFLSGEQKKAIVDLLFKTNRKVTVKQLKEDYFKKIECFDSVEISGVEDRFNASLGTYHDLLKIIKDKDFLDNEENEDILEDIVLTLTLFEDREMIEERLKTYAHLFDDKVMKQLKRRRYTGWGRLSRKLINGIRDKQSGKTILDFLKSDGFANRNFMQLIHDDSLTFKEDIQKAQVSGQGDSLHEHIANLAGSPAIKKGILQTVKVVDELVKVMGRHKPENIVIEMARENQTTQKGQKNSRERMKRIEEGIKELGSQILKEHPVENTQLQNEKLYLYYLQNGRDMYVDQELDINRLSDYDVDHIVPQSFLKDDSIDNKVLTRSDKARGKSDNVPSEEVVKKMKNYWRQLLNAKLITQRKFDNLTKAERGGLSELDKAGFIKRQLVETRQITKHVAQILDSRMNTKYDENDKLIREVKVITLKSKLVSDFRKDFQFYKVREINNYHHAHDAYLNAVVGTALIKKYPKLESEFVYGDYKVYDVRKMIAKSEQEIGKATAKYFFYSNIMNFFKTEITLANGEIRKRPLIETNGETGEIVWDKGRDFATVRKVLSMPQVNIVKKTEVQTGGFSKESILPKRNSDKLIARKKDWDPKKYGGFDSPTVAYSVLVVAKVEKGKSKKLKSVKELLGITIMERSSFEKNPIDFLEAKGYKEVKKDLIIKLPKYSLFELENGRKRMLASAGELQKGNELALPSKYVNFLYLASHYEKLKGSPEDNEQKQLFVEQHKHYLDEIIEQISEFSKRVILADANLDKVLSAYNKHRDKPIREQAENIIHLFTLTNLGAPAAFKYFDTTIDRKRYTSTKEVLDATLIHQSITGLYETRIDLSQLGGDGGPAPGGGEAAAKGGLLGRDLLTKLKAQIQFSTEGPQVTWEDRPAMCLVLNLEEEYRLHEKPVPPSIDPSWLQLFPMVWAEKAGMGLANQVPPVVVELKSDASPVAVRQYPMSKEAREGIRPHIQRFLDLGILVPCQSPWNTPLLPVKKPGTNDYRPVQDLREVNKRVQDIHPTVPNPYNLLSSLPPSHTWYSVLDLKDAFFCLKLHPNSQPLFAFEWRDPEKGNTGQLTWTRLPQGFKNSPTLFNEALHRDLASFRALNPQVVMLQYVDDLLVAAPTYRDCKEGTRRLLQELSKLGYRVSAKKAQLCREEVTYLGYLLKGGKRWLTPARKATVMKIPTPTTPRQVREFLGKAGFCRLFIPGFASLAAPLYPLTRPKVPFTWTEAHQEAFGRIKEALLSAPALALPDLTKPFALYVDEKEGVARGVLTQTLGPWRRPVAYLSKKLDPVASGWPTCLKAIAAVALLLKDADKLTLGQNVLVIAPHNLESIVRQPPDRWMTNARMTHYQSLLLNERVSFAPPAILNPATLLPVESDDTPIHICSEILAEETGTRPDLRDQPLPGVPAWYTDGSSFIMDGRRQAGAAIVDNKRTVWASNLPEGTSAQKAELIALTQALRLAEGKSINIYTDSRYAFATAHVHGAIYKQRGWLTSAGKDIKNKEEILALLEAIHLPKRVAIIHCPGHQRGTDPVATGNRKADEAAKQAAQSTRILTETTKNAGKRTADGSEFEKRTADGSEFESPKKKAKVE

SEQ ID NO: 7532 - protein, 2218 aa, synthetic construct
MPAAKRVKLDGGDKKYSIGLDIGTNSVGWAVITDEYKVPSKKFKVLGNTDRHSIKKNLIGALLFDSGETAEATRLKRTARRRYTRRKNRICYLQEIFSNEMAKVDDSFFHRLEESFLVEEDKKHERHPIFGNIVDEVAYHEKYPTIYHLRKKLVDSTDKADLRLIYLALAHMIKFRGHFLIEGDLNPDNSDVDKLFIQLVQTYNQLFEENPINASGVDAKAILSARLSKSRRLENLIAQLPGEKKNGLFGNLIALSLGLTPNFKSNFDLAEDAKLQLSKDTYDDDLDNLLAQIGDQYADLFLAAKNLSDAILLSDILRVNTEITKAPLSASMIKRYDEHHQDLTLLKALVRQQLPEKYKEIFFDQSKNGYAGYIDGGASQEEFYKFIKPILEKMDGTEELLVKLNREDLLRKQRTFDNGSIPHQIHLGELHAILRRQEDFYPFLKDNREKIEKILTFRIPYYVGPLARGNSRFAWMTRKSEETITPWNFEEVVDKGASAQSFIERMTNFDKNLPNEKVLPKHSLLYEYFTVYNELTKVKYVTEGMRKPAFLSGEQKKAIVDLLFKTNRKVTVKQLKEDYFKKIECFDSVEISGVEDRFNASLGTYHDLLKIIKDKDFLDNEENEDILEDIVLTLTLFEDREMIEERLKTYAHLFDDKVMKQLKRRRYTGWGRLSRKLINGIRDKQSGKTILDFLKSDGFANRNFMQLIHDDSLTFKEDIQKAQVSGQGDSLHEHIANLAGSPAIKKGILQTVKVVDELVKVMGRHKPENIVIEMARENQTTQKGQKNSRERMKRIEEGIKELGSQILKEHPVENTQLQNEKLYLYYLQNGRDMYVDQELDINRLSDYDVDHIVPQSFLKDDSIDNKVLTRSDKARGKSDNVPSEEVVKKMKNYWRQLLNAKLITQRKFDNLTKAERGGLSELDKAGFIKRQLVETRQITKHVAQILDSRMNTKYDENDKLIREVKVITLKSKLVSDFRKDFQFYKVREINNYHHAHDAYLNAVVGTALIKKYPKLESEFVYGDYKVYDVRKMIAKSEQEIGKATAKYFFYSNIMNFFKTEITLANGEIRKRPLIETNGETGEIVWDKGRDFATVRKVLSMPQVNIVKKTEVQTGGFSKESILPKRNSDKLIARKKDWDPKKYGGFDSPTVAYSVLVVAKVEKGKSKKLKSVKELLGITIMERSSFEKNPIDFLEAKGYKEVKKDLIIKLPKYSLFELENGRKRMLASAGELQKGNELALPSKYVNFLYLASHYEKLKGSPEDNEQKQLFVEQHKHYLDEIIEQISEFSKRVILADANLDKVLSAYNKHRDKPIREQAENIIHLFTLTNLGAPAAFKYFDTTIDRKRYTSTKEVLDATLIHQSITGLYETRIDLSQLGGDGGPAPGGGEAAAKGGTLGDQGSRGSDPLPEPRVTLTVEGIPTEFLVNTGAEHSVLTKPMGKMGSKRTVVAGATGSKVYPWTTKRLLKIGQKQVTHSFLVIPECPAPLLGRDLLTKLKAQIQFSTEGPQVTWEDRPAMCLVLNLEEEYRLHEKPVPPSIDPSWLQLFPMVWAEKAGMGLANQVPPVVVELKSDASPVAVRQYPMSKEAREGIRPHIQRFLDLGILVPCQSPWNTPLLPVKKPGTNDYRPVQDLREVNKRVQDIHPTVPNPYNLLSSLPPSHTWYSVLDLKDAFFCLKLHPNSQPLFAFEWRDPEKGNTGQLTWTRLPQGFKNSPTLFNEALHRDLASFRALNPQVVMLQYVDDLLVAAPTYRDCKEGTRRLLQELSKLGYRVSAKKAQLCREEVTYLGYLLKGGKRWLTPARKATVMKIPTPTTPRQVREFLGTAGFCRLWIPGFASLAAPLYPLTRPKVPFTWTEAHQEAFGRIKEALLSAPALALPDLTKPFALYVDEKEGVARGVLTQTLGPWRRPVAYLSKKLDPVASGWPTCLKAIAAVALLLKDADKLTLGQNVLVIAPHNLESIVRQPPDRWMTNARMTHYQSLLLNERVSFAPPAILNPATLLPVESDDTPIHICSEILAEETGTRPDLRDQPLPGVPAWYTDGSSFIMDGRRQAGAAIVDNKRTVWASNLPEGTSAQKAELIALTQALRLAEGKSINIYTDSRYAFATAHVHGAIYKQRGWLTSAGKDIKNKEEILALLEAIHLPKRVAIIHCPGHQRGTDPVATGNRKADEAAKQAAQSTRILTETTKNAGKRTADGSEFEKRTADGSEFESPKKKAKVE

SEQ ID NO: 7533 - protein, 2218 aa, synthetic construct
MPAAKRVKLDGGDKKYSIGLDIGTNSVGWAVITDEYKVPSKKFKVLGNTDRHSIKKNLIGALLFDSGETAEATRLKRTARRRYTRRKNRICYLQEIFSNEMAKVDDSFFHRLEESFLVEEDKKHERHPIFGNIVDEVAYHEKYPTIYHLRKKLVDSTDKADLRLIYLALAHMIKFRGHFLIEGDLNPDNSDVDKLFIQLVQTYNQLFEENPINASGVDAKAILSARLSKSRRLENLIAQLPGEKKNGLFGNLIALSLGLTPNFKSNFDLAEDAKLQLSKDTYDDDLDNLLAQIGDQYADLFLAAKNLSDAILLSDILRVNTEITKAPLSASMIKRYDEHHQDLTLLKALVRQQLPEKYKEIFFDQSKNGYAGYIDGGASQEEFYKFIKPILEKMDGTEELLVKLNREDLLRKQRTFDNGSIPHQIHLGELHAILRRQEDFYPFLKDNREKIEKILTFRIPYYVGPLARGNSRFAWMTRKSEETITPWNFEEVVDKGASAQSFIERMTNFDKNLPNEKVLPKHSLLYEYFTVYNELTKVKYVTEGMRKPAFLSGEQKKAIVDLLFKTNRKVTVKQLKEDYFKKIECFDSVEISGVEDRFNASLGTYHDLLKIIKDKDFLDNEENEDILEDIVLTLTLFEDREMIEERLKTYAHLFDDKVMKQLKRRRYTGWGRLSRKLINGIRDKQSGKTILDFLKSDGFANRNFMQLIHDDSLTFKEDIQKAQVSGQGDSLHEHIANLAGSPAIKKGILQTVKVVDELVKVMGRHKPENIVIEMARENQTTQKGQKNSRERMKRIEEGIKELGSQILKEHPVENTQLQNEKLYLYYLQNGRDMYVDQELDINRLSDYDVDHIVPQSFLKDDSIDNKVLTRSDKARGKSDNVPSEEVVKKMKNYWRQLLNAKLITQRKFDNLTKAERGGLSELDKAGFIKRQLVETRQITKHVAQILDSRMNTKYDENDKLIREVKVITLKSKLVSDFRKDFQFYKVREINNYHHAHDAYLNAVVGTALIKKYPKLESEFVYGDYKVYDVRKMIAKSEQEIGKATAKYFFYSNIMNFFKTEITLANGEIRKRPLIETNGETGEIVWDKGRDFATVRKVLSMPQVNIVKKTEVQTGGFSKESILPKRNSDKLIARKKDWDPKKYGGFDSPTVAYSVLVVAKVEKGKSKKLKSVKELLGITIMERSSFEKNPIDFLEAKGYKEVKKDLIIKLPKYSLFELENGRKRMLASAGELQKGNELALPSKYVNFLYLASHYEKLKGSPEDNEQKQLFVEQHKHYLDEIIEQISEFSKRVILADANLDKVLSAYNKHRDKPIREQAENIIHLFTLTNLGAPAAFKYFDTTIDRKRYTSTKEVLDATLIHQSITGLYETRIDLSQLGGDGGPAPGGGEAAAKGGTLGDQGSRGSDPLPEPRVTLTVEGIPTEFLVNTGAEHSVLTKPMGKMGSKRTVVAGATGSKVYPWTTKRLLKIGQKQVTHSFLVIPECPAPLLGRDLLTKLKAQIQFSTEGPQVTWEDRPAMCLVLNLEEEYRLHEKPVPPSIDPSWLQLFPMVWAEKAGMGLANQVPPVVVELKSDASPVAVRQYPMSKEAREGIRPHIQRFLDLGILVPCQSPWNTPLLPVKKPGTNDYRPVQDLREVNKRVQDIHPTVPNPYNLLSSLPPSHTWYSVLDLKDAFFCLKLHPNSQPLFAFEWRDPEKGNTGQLTWTRLPQGFKNSPTLFNEALHRDLASFRALNPQVVMLQYVDDLLVAAPTYRDCKEGTRRLLQELSKLGYRVSAKKAQLCREEVTYLGYLLKGGKRWLTPARKATVMKIPTPTTPRQVREFLGKAGFCRLFIPGFASLAAPLYPLTRPKVPFTWTEAHQEAFGRIKEALLSAPALALPDLTKPFALYVDEKEGVARGVLTQTLGPWRRPVAYLSKKLDPVASGWPTCLKAIAAVALLLKDADKLTLGQNVLVIAPHNLESIVRQPPDRWMTNARMTHYQSLLLNERVSFAPPAILNPATLLPVESDDTPIHICSEILAEETGTRPDLRDQPLPGVPAWYTDGSSFIMDGRRQAGAAIVDNKRTVWASNLPEGTSAQKAELIALTQALRLAEGKSINIYTDSRYAFATAHVHGAIYKQRGWLTSAGKDIKNKEEILALLEAIHLPKRVAIIHCPGHQRGTDPVATGNRKADEAAKQAAQSTRILTETTKNAGKRTADGSEFEKRTADGSEFESPKKKAKVE

SEQ ID NO: 7534 - protein, 2096 aa, synthetic construct
MPAAKRVKLDGGDKKYSIGLDIGTNSVGWAVITDEYKVPSKKFKVLGNTDRHSIKKNLIGALLFDSGETAEATRLKRTARRRYTRRKNRICYLQEIFSNEMAKVDDSFFHRLEESFLVEEDKKHERHPIFGNIVDEVAYHEKYPTIYHLRKKLVDSTDKADLRLIYLALAHMIKFRGHFLIEGDLNPDNSDVDKLFIQLVQTYNQLFEENPINASGVDAKAILSARLSKSRRLENLIAQLPGEKKNGLFGNLIALSLGLTPNFKSNFDLAEDAKLQLSKDTYDDDLDNLLAQIGDQYADLFLAAKNLSDAILLSDILRVNTEITKAPLSASMIKRYDEHHQDLTLLKALVRQQLPEKYKEIFFDQSKNGYAGYIDGGASQEEFYKFIKPILEKMDGTEELLVKLNREDLLRKQRTFDNGSIPHQIHLGELHAILRRQEDFYPFLKDNREKIEKILTFRIPYYVGPLARGNSRFAWMTRKSEETITPWNFEEVVDKGASAQSFIERMTNFDKNLPNEKVLPKHSLLYEYFTVYNELTKVKYVTEGMRKPAFLSGEQKKAIVDLLFKTNRKVTVKQLKEDYFKKIECFDSVEISGVEDRFNASLGTYHDLLKIIKDKDFLDNEENEDILEDIVLTLTLFEDREMIEERLKTYAHLFDDKVMKQLKRRRYTGWGRLSRKLINGIRDKQSGKTILDFLKSDGFANRNFMQLIHDDSLTFKEDIQKAQVSGQGDSLHEHIANLAGSPAIKKGILQTVKVVDELVKVMGRHKPENIVIEMARENQTTQKGQKNSRERMKRIEEGIKELGSQILKEHPVENTQLQNEKLYLYYLQNGRDMYVDQELDINRLSDYDVDHIVPQSFLKDDSIDNKVLTRSDKARGKSDNVPSEEVVKKMKNYWRQLLNAKLITQRKFDNLTKAERGGLSELDKAGFIKRQLVETRQITKHVAQILDSRMNTKYDENDKLIREVKVITLKSKLVSDFRKDFQFYKVREINNYHHAHDAYLNAVVGTALIKKYPKLESEFVYGDYKVYDVRKMIAKSEQEIGKATAKYFFYSNIMNFFKTEITLANGEIRKRPLIETNGETGEIVWDKGRDFATVRKVLSMPQVNIVKKTEVQTGGFSKESILPKRNSDKLIARKKDWDPKKYGGFDSPTVAYSVLVVAKVEKGKSKKLKSVKELLGITIMERSSFEKNPIDFLEAKGYKEVKKDLIIKLPKYSLFELENGRKRMLASAGELQKGNELALPSKYVNFLYLASHYEKLKGSPEDNEQKQLFVEQHKHYLDEIIEQISEFSKRVILADANLDKVLSAYNKHRDKPIREQAENIIHLFTLTNLGAPAAFKYFDTTIDRKRYTSTKEVLDATLIHQSITGLYETRIDLSQLGGDGGPAPGGGEAAAKGGTLNLEDEYRLYETSAEPEVSPGSTWLSDFPQAWAETGGMGLAVRQAPLIIPLKATSTPVSIKQYPMSQEAKLGIKPHIQRLLDQGILVPCQSPWNTPLLPVKKPGTNDYRPVQDLREVNKRVEDIHPTVPNPYNLLSGLPPSHRWYTVLDLKDAFFCLRLHPTSQPLFAFEWRDPGMGISGQLTWTRLPQGFKNSPTLFNEALHRDLADFRIQHPDLILLQYVDDILLAATSELDCQQGTRALLLTLGNLGYRASAKKAQLCQKQVKYLGYLLKEGQRWLTEARKETVMGQPTPKTPRQLREFLGTAGFCRLWIPGFAEMAAPLYPLTKPGTLFNWGPDQQKAYQEIKQALLTAPALGLPDLTKPFELFVDEKQGYAKGVLTQKLGPWRRPVAYLSKKLDPVAAGWPPCLRMVAAIAVLRKDAGKLTMGQPLVILAPHAVEALVKQPPDRWLSNARMTHYQAMLLDTDRVQFGPVVALNPATLLPLPEEGAPHDCLEILAETHGTRPDLTDQPIPDADHTWYTDGSSFLQEGQRKAGAAVTTETEVIWARALPAGTSAQRAELIALTQALKMAEGKRLNVYTDSRYAFATAHIHGEIYRRRGWLTSEGREIKNKSEILALLKALFLPKRLSIIHCLGHQKGDSAEARGNRLADQAAREAAIKTPPDTSTLLAGKRTADGSEFEKRTADGSEFESPKKKAKVE

SEQ ID NO: 7535 - protein, 2096 aa, synthetic construct
MPAAKRVKLDGGDKKYSIGLDIGTNSVGWAVITDEYKVPSKKFKVLGNTDRHSIKKNLIGALLFDSGETAEATRLKRTARRRYTRRKNRICYLQEIFSNEMAKVDDSFFHRLEESFLVEEDKKHERHPIFGNIVDEVAYHEKYPTIYHLRKKLVDSTDKADLRLIYLALAHMIKFRGHFLIEGDLNPDNSDVDKLFIQLVQTYNQLFEENPINASGVDAKAILSARLSKSRRLENLIAQLPGEKKNGLFGNLIALSLGLTPNFKSNFDLAEDAKLQLSKDTYDDDLDNLLAQIGDQYADLFLAAKNLSDAILLSDILRVNTEITKAPLSASMIKRYDEHHQDLTLLKALVRQQLPEKYKEIFFDQSKNGYAGYIDGGASQEEFYKFIKPILEKMDGTEELLVKLNREDLLRKQRTFDNGSIPHQIHLGELHAILRRQEDFYPFLKDNREKIEKILTFRIPYYVGPLARGNSRFAWMTRKSEETITPWNFEEVVDKGASAQSFIERMTNFDKNLPNEKVLPKHSLLYEYFTVYNELTKVKYVTEGMRKPAFLSGEQKKAIVDLLFKTNRKVTVKQLKEDYFKKIECFDSVEISGVEDRFNASLGTYHDLLKIIKDKDFLDNEENEDILEDIVLTLTLFEDREMIEERLKTYAHLFDDKVMKQLKRRRYTGWGRLSRKLINGIRDKQSGKTILDFLKSDGFANRNFMQLIHDDSLTFKEDIQKAQVSGQGDSLHEHIANLAGSPAIKKGILQTVKVVDELVKVMGRHKPENIVIEMARENQTTQKGQKNSRERMKRIEEGIKELGSQILKEHPVENTQLQNEKLYLYYLQNGRDMYVDQELDINRLSDYDVDHIVPQSFLKDDSIDNKVLTRSDKARGKSDNVPSEEVVKKMKNYWRQLLNAKLITQRKFDNLTKAERGGLSELDKAGFIKRQLVETRQITKHVAQILDSRMNTKYDENDKLIREVKVITLKSKLVSDFRKDFQFYKVREINNYHHAHDAYLNAVVGTALIKKYPKLESEFVYGDYKVYDVRKMIAKSEQEIGKATAKYFFYSNIMNFFKTEITLANGEIRKRPLIETNGETGEIVWDKGRDFATVRKVLSMPQVNIVKKTEVQTGGFSKESILPKRNSDKLIARKKDWDPKKYGGFDSPTVAYSVLVVAKVEKGKSKKLKSVKELLGITIMERSSFEKNPIDFLEAKGYKEVKKDLIIKLPKYSLFELENGRKRMLASAGELQKGNELALPSKYVNFLYLASHYEKLKGSPEDNEQKQLFVEQHKHYLDEIIEQISEFSKRVILADANLDKVLSAYNKHRDKPIREQAENIIHLFTLTNLGAPAAFKYFDTTIDRKRYTSTKEVLDATLIHQSITGLYETRIDLSQLGGDGGPAPGGGEAAAKGGTLGIEDEYRLHETSTEPDVSLGSTWLSDFPQAWAETGGMGLAVRQAPLIIPLKATSTPVSIQQYPMSHEARLGIKPHIQRLLDQGILVPCQSPWNTPLLPVKKPGTNDYRPVQDLREVNKRVEDIHPTVPNPYNLLSGLPPSHQWYTVLDLKDAFFCLRLHPTSQPLFAFEWRDPGMGISGQLTWTRLPQGFKNSPTLFNEALHRDLADFRIQHPDLILLQYVDDILLAATSELDCQQGTRALLQTLGDLGYRASAKKAQICQKQVKYLGYLLREGQRWLTEARKETVMGQPVPKTPRQLREFLGTAGFCRLWIPGFAEMAAPLYPLTKPGTLFSWGPDQQKAYQEIKQALLTAPALGLPDLTKPFELFVDEKQGYAKGVLTQKLGPWRRPVAYLSKKLDPVAAGWPPCLRMVAAIAVLTKDAGKLTMGQPLVILAPHAVEALVKQPPDRWLSNARMTHYQAMLLDTDRVQFGPVVALNPATLLPLPEEGAPHDCLEILAETHGTRPDLTDQPIPDADHTWYTDGSSFLQEGQRKAGAAVTTETEVIWAGALPAGTSAQRAELIALTQALKMAEGKRLNVYTDSRYAFATAHIHGEIYRRRGWLTSEGREIKNKSEILALLKALFLPKRLSIIHCLGHQKGDSAEARGNRLADQAAREAAIKTPPDTSTLLAGKRTADGSEFEKRTADGSEFESPKKKAKVE

SEQ ID NO: 7536 - protein, 2096 aa, synthetic construct
MPAAKRVKLDGGDKKYSIGLDIGTNSVGWAVITDEYKVPSKKFKVLGNTDRHSIKKNLIGALLFDSGETAEATRLKRTARRRYTRRKNRICYLQEIFSNEMAKVDDSFFHRLEESFLVEEDKKHERHPIFGNIVDEVAYHEKYPTIYHLRKKLVDSTDKADLRLIYLALAHMIKFRGHFLIEGDLNPDNSDVDKLFIQLVQTYNQLFEENPINASGVDAKAILSARLSKSRRLENLIAQLPGEKKNGLFGNLIALSLGLTPNFKSNFDLAEDAKLQLSKDTYDDDLDNLLAQIGDQYADLFLAAKNLSDAILLSDILRVNTEITKAPLSASMIKRYDEHHQDLTLLKALVRQQLPEKYKEIFFDQSKNGYAGYIDGGASQEEFYKFIKPILEKMDGTEELLVKLNREDLLRKQRTFDNGSIPHQIHLGELHAILRRQEDFYPFLKDNREKIEKILTFRIPYYVGPLARGNSRFAWMTRKSEETITPWNFEEVVDKGASAQSFIERMTNFDKNLPNEKVLPKHSLLYEYFTVYNELTKVKYVTEGMRKPAFLSGEQKKAIVDLLFKTNRKVTVKQLKEDYFKKIECFDSVEISGVEDRFNASLGTYHDLLKIIKDKDFLDNEENEDILEDIVLTLTLFEDREMIEERLKTYAHLFDDKVMKQLKRRRYTGWGRLSRKLINGIRDKQSGKTILDFLKSDGFANRNFMQLIHDDSLTFKEDIQKAQVSGQGDSLHEHIANLAGSPAIKKGILQTVKVVDELVKVMGRHKPENIVIEMARENQTTQKGQKNSRERMKRIEEGIKELGSQILKEHPVENTQLQNEKLYLYYLQNGRDMYVDQELDINRLSDYDVDHIVPQSFLKDDSIDNKVLTRSDKARGKSDNVPSEEVVKKMKNYWRQLLNAKLITQRKFDNLTKAERGGLSELDKAGFIKRQLVETRQITKHVAQILDSRMNTKYDENDKLIREVKVITLKSKLVSDFRKDFQFYKVREINNYHHAHDAYLNAVVGTALIKKYPKLESEFVYGDYKVYDVRKMIAKSEQEIGKATAKYFFYSNIMNFFKTEITLANGEIRKRPLIETNGETGEIVWDKGRDFATVRKVLSMPQVNIVKKTEVQTGGFSKESILPKRNSDKLIARKKDWDPKKYGGFDSPTVAYSVLVVAKVEKGKSKKLKSVKELLGITIMERSSFEKNPIDFLEAKGYKEVKKDLIIKLPKYSLFELENGRKRMLASAGELQKGNELALPSKYVNFLYLASHYEKLKGSPEDNEQKQLFVEQHKHYLDEIIEQISEFSKRVILADANLDKVLSAYNKHRDKPIREQAENIIHLFTLTNLGAPAAFKYFDTTIDRKRYTSTKEVLDATLIHQSITGLYETRIDLSQLGGDGGPAPGGGEAAAKGGTLNIEDEYRLHETSKEPDVSLGSTWLSDFPQAWAETGGMGLAVRQAPLIIPLKATSTPVSIKQYPMSQEARLGIKPHIQRLLDQGILVPCQSPWNTPLLPVKKPGTNDYRPVQDLREVNKRVEDIHPTVPNPYNLLSGLPPSHQWYTVLDLKDAFFCLRLHPTSQPLFAFEWRDPEMGISGQLTWTRLPQGFKNSPTLFNEALHRDLAGFRIQHPDLILLQYVDDLLLAATSELDCQQGTRALLQTLGDLGYRASAKKAQICQKQVKYLGYLLKEGQRWLTEARKETVMGQPIPKTPRQLREFLGTAGFCRLWIPGFAEMAAPLYPLTKPGTLFNWGPDQQKAFQEIKQALLTAPALGLPDLTKPFELFVDEKQGYAKGVLTQKLGPWRRPVAYLSKKLDPVAAGWPPCLRMVAAIAVLTKDAGKLTMGQPLVILAPHAVEALVKQPPDRWLSNARMTHYQALLLDTDRVQFGPVVALNPATLLPLPEEGLQHDCLDILAEAHGTRSDLMDQPLPDADHTWYTDGSSFLQEGQRKAGAAVTTETEVIWARALPAGTSAQRAELIALTQALKMAEGKKLNVYTDSRYAFATAHIHGEIYRRRGWLTSEGKEIKNKDEILALLKALFLPKRLSIIHCPGHQKGNSAEARGNRMADQAAREVATRETPETSTLLAGKRTADGSEFEKRTADGSEFESPKKKAKVE

SEQ ID NO: 7537 - protein, 2096 aa, synthetic construct
MPAAKRVKLDGGDKKYSIGLDIGTNSVGWAVITDEYKVPSKKFKVLGNTDRHSIKKNLIGALLFDSGETAEATRLKRTARRRYTRRKNRICYLQEIFSNEMAKVDDSFFHRLEESFLVEEDKKHERHPIFGNIVDEVAYHEKYPTIYHLRKKLVDSTDKADLRLIYLALAHMIKFRGHFLIEGDLNPDNSDVDKLFIQLVQTYNQLFEENPINASGVDAKAILSARLSKSRRLENLIAQLPGEKKNGLFGNLIALSLGLTPNFKSNFDLAEDAKLQLSKDTYDDDLDNLLAQIGDQYADLFLAAKNLSDAILLSDILRVNTEITKAPLSASMIKRYDEHHQDLTLLKALVRQQLPEKYKEIFFDQSKNGYAGYIDGGASQEEFYKFIKPILEKMDGTEELLVKLNREDLLRKQRTFDNGSIPHQIHLGELHAILRRQEDFYPFLKDNREKIEKILTFRIPYYVGPLARGNSRFAWMTRKSEETITPWNFEEVVDKGASAQSFIERMTNFDKNLPNEKVLPKHSLLYEYFTVYNELTKVKYVTEGMRKPAFLSGEQKKAIVDLLFKTNRKVTVKQLKEDYFKKIECFDSVEISGVEDRFNASLGTYHDLLKIIKDKDFLDNEENEDILEDIVLTLTLFEDREMIEERLKTYAHLFDDKVMKQLKRRRYTGWGRLSRKLINGIRDKQSGKTILDFLKSDGFANRNFMQLIHDDSLTFKEDIQKAQVSGQGDSLHEHIANLAGSPAIKKGILQTVKVVDELVKVMGRHKPENIVIEMARENQTTQKGQKNSRERMKRIEEGIKELGSQILKEHPVENTQLQNEKLYLYYLQNGRDMYVDQELDINRLSDYDVDHIVPQSFLKDDSIDNKVLTRSDKARGKSDNVPSEEVVKKMKNYWRQLLNAKLITQRKFDNLTKAERGGLSELDKAGFIKRQLVETRQITKHVAQILDSRMNTKYDENDKLIREVKVITLKSKLVSDFRKDFQFYKVREINNYHHAHDAYLNAVVGTALIKKYPKLESEFVYGDYKVYDVRKMIAKSEQEIGKATAKYFFYSNIMNFFKTEITLANGEIRKRPLIETNGETGEIVWDKGRDFATVRKVLSMPQVNIVKKTEVQTGGFSKESILPKRNSDKLIARKKDWDPKKYGGFDSPTVAYSVLVVAKVEKGKSKKLKSVKELLGITIMERSSFEKNPIDFLEAKGYKEVKKDLIIKLPKYSLFELENGRKRMLASAGELQKGNELALPSKYVNFLYLASHYEKLKGSPEDNEQKQLFVEQHKHYLDEIIEQISEFSKRVILADANLDKVLSAYNKHRDKPIREQAENIIHLFTLTNLGAPAAFKYFDTTIDRKRYTSTKEVLDATLIHQSITGLYETRIDLSQLGGDGGPAPGGGEAAAKGGTLNIEDEHRLHETSKEPDVSLGSTWLSDFPQAWAETGGMGLAVRQAPLIIPLKATSTPVSIKQYPMSQEARLGIKPHIQRLLDQGILVPCQSPWNTPLLPVKKPGTNDYRPVQDLREVNKRVEDIHPTVPNPYNLLSGLPPSHQWYTVLDLKDAFFCLRLHPTSQPLFAFEWRDPEMGISGQLTWTRLPQGFKNSPTLFNEALHRDLADFRIQHPDLILLQYVDDLLLAATSELDCQQGTRALLQTLGNLGYRASAKKAQICQKQVKYLGYLLKEGQRWLTEARKETVMGQPTPKTPRQLREFLGTAGFCRLWIPGFAEMAAPLYPLTKPGTLFNWGPDQQKAYQEIKQALLTAPALGLPDLTKPFELFVDEKQGYAKGVLTQKLGPWRRPVAYLSKKLDPVAAGWPPCLRMVAAIAVLTKDAGKLTMGQPLVILAPHAVEALVKQPPDRWLSNARMTHYQALLLDTDRVQFGPVVALNPATLLPLPEEGLQHNCLDILAEAHGTRPDLTDQPLPDADHTWYTDGSSLLQEGQRKAGAAVTTETEVIWAKALPAGTSAQRAELIALTQALKMAEGKKLNVYTDSRYAFATAHIHGEIYRRRGWLTSEGKEIKNKDEILALLKALFLPKRLSIIHCPGHQKGHSAEARGNRMADQAARKAAITETPDTSTLLAGKRTADGSEFEKRTADGSEFESPKKKAKVE

SEQ ID NO: 7538 - protein, 2096 aa, synthetic construct
MPAAKRVKLDGGDKKYSIGLDIGTNSVGWAVITDEYKVPSKKFKVLGNTDRHSIKKNLIGALLFDSGETAEATRLKRTARRRYTRRKNRICYLQEIFSNEMAKVDDSFFHRLEESFLVEEDKKHERHPIFGNIVDEVAYHEKYPTIYHLRKKLVDSTDKADLRLIYLALAHMIKFRGHFLIEGDLNPDNSDVDKLFIQLVQTYNQLFEENPINASGVDAKAILSARLSKSRRLENLIAQLPGEKKNGLFGNLIALSLGLTPNFKSNFDLAEDAKLQLSKDTYDDDLDNLLAQIGDQYADLFLAAKNLSDAILLSDILRVNTEITKAPLSASMIKRYDEHHQDLTLLKALVRQQLPEKYKEIFFDQSKNGYAGYIDGGASQEEFYKFIKPILEKMDGTEELLVKLNREDLLRKQRTFDNGSIPHQIHLGELHAILRRQEDFYPFLKDNREKIEKILTFRIPYYVGPLARGNSRFAWMTRKSEETITPWNFEEVVDKGASAQSFIERMTNFDKNLPNEKVLPKHSLLYEYFTVYNELTKVKYVTEGMRKPAFLSGEQKKAIVDLLFKTNRKVTVKQLKEDYFKKIECFDSVEISGVEDRFNASLGTYHDLLKIIKDKDFLDNEENEDILEDIVLTLTLFEDREMIEERLKTYAHLFDDKVMKQLKRRRYTGWGRLSRKLINGIRDKQSGKTILDFLKSDGFANRNFMQLIHDDSLTFKEDIQKAQVSGQGDSLHEHIANLAGSPAIKKGILQTVKVVDELVKVMGRHKPENIVIEMARENQTTQKGQKNSRERMKRIEEGIKELGSQILKEHPVENTQLQNEKLYLYYLQNGRDMYVDQELDINRLSDYDVDHIVPQSFLKDDSIDNKVLTRSDKARGKSDNVPSEEVVKKMKNYWRQLLNAKLITQRKFDNLTKAERGGLSELDKAGFIKRQLVETRQITKHVAQILDSRMNTKYDENDKLIREVKVITLKSKLVSDFRKDFQFYKVREINNYHHAHDAYLNAVVGTALIKKYPKLESEFVYGDYKVYDVRKMIAKSEQEIGKATAKYFFYSNIMNFFKTEITLANGEIRKRPLIETNGETGEIVWDKGRDFATVRKVLSMPQVNIVKKTEVQTGGFSKESILPKRNSDKLIARKKDWDPKKYGGFDSPTVAYSVLVVAKVEKGKSKKLKSVKELLGITIMERSSFEKNPIDFLEAKGYKEVKKDLIIKLPKYSLFELENGRKRMLASAGELQKGNELALPSKYVNFLYLASHYEKLKGSPEDNEQKQLFVEQHKHYLDEIIEQISEFSKRVILADANLDKVLSAYNKHRDKPIREQAENIIHLFTLTNLGAPAAFKYFDTTIDRKRYTSTKEVLDATLIHQSITGLYETRIDLSQLGGDGGPAPGGGEAAAKGGTLNIEDEHRLHETSKEPDVSLGSTWLSDFPQAWAETGGMGLAVRQAPLIIPLKATSTPVSIKQYPMSQEARLGIKPHIQRLLDQGILVPCQSPWNTPLLPVKKPGTNDYRPVQDLREVNKRVEDIHPTVPNPYNLLSGLPPSHQWYTVLDLKDAFFCLRLHPTSQPLFAFEWRDPEMGISGQLTWTRLPQGFKNSPTLFDEALHRDLADFRIQHPDLILLQYVDDLLLAATSELDCQQGTRALLQTLGNLGYRASAKKAQICQKQVKYLGYLLKEGQRWLTEARKETVMGQPTPKTPRQLREFLGTAGFCRLWIPGFAEMAAPLYPLTKTGTLFNWGPDQQKAYQEIKQALLTAPALGLPDLTKPFELFVDEKQGYAKGVLTQKLGPWRRPVAYLSKKLDPVAAGWPPCLRMVAAIAVLTKDAGKLTMGQPLVILAPHAVEALVKQPPDRWLSNARMTHYQALLLDTDRVQFGPVVALNPATLLPLPEEGLQHNCLDILAEAHGTRPDLTDQPLPDADHTWYTDGSSLLQEGQRKAGAAVTTETEVIWAKALPAGTSAQRAELIALTQALKMAEGKKLNVYTDSRYAFATAHIHGEIYRRRGLLTSEGKEIKNKDEILALLKALFLPKRLSIIHCPGHQKGHSAEARGNRMADQAARKAAITETPDTSTLLAGKRTADGSEFEKRTADGSEFESPKKKAKVE

SEQ ID NO: 7539 - protein, 2096 aa, synthetic construct; identical to SEQ ID NO: 7537

SEQ ID NO: 7540 - protein, 2090 aa, synthetic construct
MPAAKRVKLDGGDKKYSIGLDIGTNSVGWAVITDEYKVPSKKFKVLGNTDRHSIKKNLIGALLFDSGETAEATRLKRTARRRYTRRKNRICYLQEIFSNEMAKVDDSFFHRLEESFLVEEDKKHERHPIFGNIVDEVAYHEKYPTIYHLRKKLVDSTDKADLRLIYLALAHMIKFRGHFLIEGDLNPDNSDVDKLFIQLVQTYNQLFEENPINASGVDAKAILSARLSKSRRLENLIAQLPGEKKNGLFGNLIALSLGLTPNFKSNFDLAEDAKLQLSKDTYDDDLDNLLAQIGDQYADLFLAAKNLSDAILLSDILRVNTEITKAPLSASMIKRYDEHHQDLTLLKALVRQQLPEKYKEIFFDQSKNGYAGYIDGGASQEEFYKFIKPILEKMDGTEELLVKLNREDLLRKQRTFDNGSIPHQIHLGELHAILRRQEDFYPFLKDNREKIEKILTFRIPYYVGPLARGNSRFAWMTRKSEETITPWNFEEVVDKGASAQSFIERMTNFDKNLPNEKVLPKHSLLYEYFTVYNELTKVKYVTEGMRKPAFLSGEQKKAIVDLLFKTNRKVTVKQLKEDYFKKIECFDSVEISGVEDRFNASLGTYHDLLKIIKDKDFLDNEENEDILEDIVLTLTLFEDREMIEERLKTYAHLFDDKVMKQLKRRRYTGWGRLSRKLINGIRDKQSGKTILDFLKSDGFANRNFMQLIHDDSLTFKEDIQKAQVSGQGDSLHEHIANLAGSPAIKKGILQTVKVVDELVKVMGRHKPENIVIEMARENQTTQKGQKNSRERMKRIEEGIKELGSQILKEHPVENTQLQNEKLYLYYLQNGRDMYVDQELDINRLSDYDVDHIVPQSFLKDDSIDNKVLTRSDKARGKSDNVPSEEVVKKMKNYWRQLLNAKLITQRKFDNLTKAERGGLSELDKAGFIKRQLVETRQITKHVAQILDSRMNTKYDENDKLIREVKVITLKSKLVSDFRKDFQFYKVREINNYHHAHDAYLNAVVGTALIKKYPKLESEFVYGDYKVYDVRKMIAKSEQEIGKATAKYFFYSNIMNFFKTEITLANGEIRKRPLIETNGETGEIVWDKGRDFATVRKVLSMPQVNIVKKTEVQTGGFSKESILPKRNSDKLIARKKDWDPKKYGGFDSPTVAYSVLVVAKVEKGKSKKLKSVKELLGITIMERSSFEKNPIDFLEAKGYKEVKKDLIIKLPKYSLFELENGRKRMLASAGELQKGNELALPSKYVNFLYLASHYEKLKGSPEDNEQKQLFVEQHKHYLDEIIEQISEFSKRVILADANLDKVLSAYNKHRDKPIREQAENIIHLFTLTNLGAPAAFKYFDTTIDRKRYTSTKEVLDATLIHQSITGLYETRIDLSQLGGDGGPAPGGGEAAAKGGTLQLDDEYRLYSPLVKPDQNIQFWLEQFPQAWAETAGMGLAKQVPPQVIQLKASATPVSVRQYPLSKEAQEGIRPHVQRLIQQGILVPVQSPWNTPLLPVRKPGTNDYRPVQDLREVNKRVQDIHPTVPNPYNLLCALPPQRSWYTVLDLKDAFFCLRLHPTSQPLFAFEWRDPGTGRTGQLTWTRLPQGFKNSPTIFDEALHRDLANFRIQHPQVTLLQYVDDLLLAGATKQDCLEGTKALLLELSDLGYRASAKKAQICRREVTYLGYSLRDGQRWLTEARKKTVVQIPAPTTAKQVREFLGTAGFCRLWIPGFATLAAPLYPLTKEKGEFSWAPEHQKAFDAIKKALLSAPALALPDVTKPFTLYVDERKGVARGVLTQTLGPWRRPVAYLSKKLDPVASGWPVCLKAIAAVAILVKDADKLTLGQNITVIAPHALENIVRQPPDRWMTNARMTHYQSLLLTERVTFAPPAALNPATLLPEETDEPVTHDCHQLLIEETGVRKDLTDIPLTGEVLTWFTDGSSYVVEGKRMAGAAVVDGTRTIWASSLPEGTSAQKAELMALTQALRLAEGKSINIYTDSRYAFATAHVHGAIYKQRGLLTSAGREIKNKEEILSLLEALHLPKRLAIIHCPGHQKAKDPISRGNQMADRVAKQAAQGVNLLAGKRTADGSEFEKRTADGSEFESPKKKAKVE

SEQ ID NO: 7541 - protein, 2090 aa, synthetic construct; identical to SEQ ID NO: 7540

SEQ ID NO: 7542 - protein, 2176 aa, synthetic construct
MPAAKRVKLDGGDKKYSIGLDIGTNSVGWAVITDEYKVPSKKFKVLGNTDRHSIKKNLIGALLFDSGETAEATRLKRTARRRYTRRKNRICYLQEIFSNEMAKVDDSFFHRLEESFLVEEDKKHERHPIFGNIVDEVAYHEKYPTIYHLRKKLVDSTDKADLRLIYLALAHMIKFRGHFLIEGDLNPDNSDVDKLFIQLVQTYNQLFEENPINASGVDAKAILSARLSKSRRLENLIAQLPGEKKNGLFGNLIALSLGLTPNFKSNFDLAEDAKLQLSKDTYDDDLDNLLAQIGDQYADLFLAAKNLSDAILLSDILRVNTEITKAPLSASMIKRYDEHHQDLTLLKALVRQQLPEKYKEIFFDQSKNGYAGYIDGGASQEEFYKFIKPILEKMDGTEELLVKLNREDLLRKQRTFDNGSIPHQIHLGELHAILRRQEDFYPFLKDNREKIEKILTFRIPYYVGPLARGNSRFAWMTRKSEETITPWNFEEVVDKGASAQSFIERMTNFDKNLPNEKVLPKHSLLYEYFTVYNELTKVKYVTEGMRKPAFLSGEQKKAIVDLLFKTNRKVTVKQLKEDYFKKIECFDSVEISGVEDRFNASLGTYHDLLKIIKDKDFLDNEENEDILEDIVLTLTLFEDREMIEERLKTYAHLFDDKVMKQLKRRRYTGWGRLSRKLINGIRDKQSGKTILDFLKSDGFANRNFMQLIHDDSLTFKEDIQKAQVSGQGDSLHEHIANLAGSPAIKKGILQTVKVVDELVKVMGRHKPENIVIEMARENQTTQKGQKNSRERMKRIEEGIKELGSQILKEHPVENTQLQNEKLYLYYLQNGRDMYVDQELDINRLSDYDVDHIVPQSFLKDDSIDNKVLTRSDKARGKSDNVPSEEVVKKMKNYWRQLLNAKLITQRKFDNLTKAERGGLSELDKAGFIKRQLVETRQITKHVAQILDSRMNTKYDENDKLIREVKVITLKSKLVSDFRKDFQFYKVREINNYHHAHDAYLNAVVGTALIKKYPKLESEFVYGDYKVYDVRKMIAKSEQEIGKATAKYFFYSNIMNFFKTEITLANGEIRKRPLIETNGETGEIVWDKGRDFATVRKVLSMPQVNIVKKTEVQTGGFSKESILPKRNSDKLIARKKDWDPKKYGGFDSPTVAYSVLVVAKVEKGKSKKLKSVKELLGITIMERSSFEKNPIDFLEAKGYKEVKKDLIIKLPKYSLFELENGRKRMLASAGELQKGNELALPSKYVNFLYLASHYEKLKGSPEDNEQKQLFVEQHKHYLDEIIEQISEFSKRVILADANLDKVLSAYNKHRDKPIREQAENIIHLFTLTNLGAPAAFKYFDTTIDRKRYTSTKEVLDATLIHQSITGLYETRIDLSQLGGDGGPAPGGGEAAAKGGMDPLQLLQPLEAEIKGTKLKAHWNSGATITCVPEAFLEDERPIQTMLIKTIHGEKQQDVYYLTFKVQGRKVEAEVLASPYDYILLNPSDVPWLMKKPLQLTVLVPLHEYQERLLQQTALPKEQKELLQKLFLKYDALWQHWENQVGHRRIKPHNIATGTLAPRPQKQYPINPKAKPSIQIVIDDLLKQGVLIQQNSTMNTPVYPVPKPDGKWRMVLDYREVNKTIPLIAAQNQHSAGILSSIYRGKYKTTLDLTNGFWAHPITPESYWLTAFTWQGKQYCWTRLPQGFLNSPALFNADVVDLLKEIPNVQAYVDDIYISHDDPQEHLEQLEKIFSILLNAGYVVSLKKSEIAQREVEFLGFNITKEGRGLTDTFKQKLLNITPPKDLKQLQSILGLLNFARNFIPNYSELVKPLYTIVAPANGKFISWTEDNSNQLQHIISVLNQADNLEERNPETRLIIKVNSSPSAGYIRYYNEGSKRPIMYVNYIFSKAEAKFTQTEKLLTTMHKGLIKAMDLAMGQEILVYSPIVSMTKIQRTPLPERKALPVRWITWMTYLEDPRIQFHYDKSLPELQQIPNVTEDVIAKTKHPSEFAMVFYTDGSAIKHPDVNKSHSAGMGIAQVQFIPEYKIVHQWSIPLGDHTAQLAEIAAVEFACKKALKISGPVLIVTDSFYVAESANKELPYWKSNGFLNNKKKPLRHVSKWKSIAECLQLKPDIIIMHEKGHQQPMTTLHTEGNNLADKLATQGSYVVHAGKRTADGSEFEKRTADGSEFESPKKKAKVE

SEQ ID NO: 7543 - protein, 2087 aa, synthetic construct
MPAAKRVKLDGGDKKYSIGLDIGTNSVGWAVITDEYKVPSKKFKVLGNTDRHSIKKNLIGALLFDSGETAEATRLKRTARRRYTRRKNRICYLQEIFSNEMAKVDDSFFHRLEESFLVEEDKKHERHPIFGNIVDEVAYHEKYPTIYHLRKKLVDSTDKADLRLIYLALAHMIKFRGHFLIEGDLNPDNSDVDKLFIQLVQTYNQLFEENPINASGVDAKAILSARLSKSRRLENLIAQLPGEKKNGLFGNLIALSLGLTPNFKSNFDLAEDAKLQLSKDTYDDDLDNLLAQIGDQYADLFLAAKNLSDAILLSDILRVNTEITKAPLSASMIKRYDEHHQDLTLLKALVRQQLPEKYKEIFFDQSKNGYAGYIDGGASQEEFYKFIKPILEKMDGTEELLVKLNREDLLRKQRTFDNGSIPHQIHLGELHAILRRQEDFYPFLKDNREKIEKILTFRIPYYVGPLARGNSRFAWMTRKSEETITPWNFEEVVDKGASAQSFIERMTNFDKNLPNEKVLPKHSLLYEYFTVYNELTKVKYVTEGMRKPAFLSGEQKKAIVDLLFKTNRKVTVKQLKEDYFKKIECFDSVEISGVEDRFNASLGTYHDLLKIIKDKDFLDNEENEDILEDIVLTLTLFEDREMIEERLKTYAHLFDDKVMKQLKRRRYTGWGRLSRKLINGIRDKQSGKTILDFLKSDGFANRNFMQLIHDDSLTFKEDIQKAQVSGQGDSLHEHIANLAGSPAIKKGILQTVKVVDELVKVMGRHKPENIVIEMARENQTTQKGQKNSRERMKRIEEGIKELGSQILKEHPVENTQLQNEKLYLYYLQNGRDMYVDQELDINRLSDYDVDHIVPQSFLKDDSIDNKVLTRSDKARGKSDNVPSEEVVKKMKNYWRQLLNAKLITQRKFDNLTKAERGGLSELDKAGFIKRQLVETRQITKHVAQILDSRMNTKYDENDKLIREVKVITLKSKLVSDFRKDFQFYKVREINNYHHAHDAYLNAVVGTALIKKYPKLESEFVYGDYKVYDVRKMIAKSEQEIGKATAKYFFYSNIMNFFKTEITLANGEIRKRPLIETNGETGEIVWDKGRDFATVRKVLSMPQVNIVKKTEVQTGGFSKESILPKRNSDKLIARKKDWDPKKYGGFDSPTVAYSVLVVAKVEKGKSKKLKSVKELLGITIMERSSFEKNPIDFLEAKGYKEVKKDLIIKLPKYSLFELENGRKRMLASAGELQKGNELALPSKYVNFLYLASHYEKLKGSPEDNEQKQLFVEQHKHYLDEIIEQISEFSKRVILADANLDKVLSAYNKHRDKPIREQAENIIHLFTLTNLGAPAAFKYFDTTIDRKRYTSTKEVLDATLIHQSITGLYETRIDLSQLGGDGGPAPGGGEAAAKGGIPWLMKKPLQLTTLVPLQEYEERLLKQTMLTGSYKEKLQSLFLKYDALWQHWENQVGHRRIKPHHIATGTVNPRPQKQYPINPKAKASIQTVINDLLKQGVLIQQNSIMNTPVYPVPKPDGKWRMVLDYREVNKTIPLIAAQNQHSAGILSSIFRGKYKTTLDLSNGFWAHSITPESYWLTAFTWLGQQYCWTRLPQGFLNSPALFNADVVDLLKEVPNVQVYVDDIYISHDDPREHLEQLEKVFSLLLNAGYVVSLKKSEIAQHEVEFLGFNITKEGRGLTETFKQKLLNITPPRDLKQLQSILGKLNFARNFIPNFSELVKPLYNIIATAPGKYITWTTDNSQQLQNIISMLNSAENLEERNPEVRLIMKVNTSPSAGYIRFYNEFAKRPIMYLNYVYTKAEVKFTNTEKLLTTIHKGLIKALDLGMGQEILVYSPIVSMTKIQKTPLPERKALPIRWITWMSYLEDPRIQFHYDKTLPELQQVPTVTDDIIAKIKHPSEFSMVFYTDGSAIKHPNVNKSHNAGMGIAQVQFKPEFTVINTWSIPLGDHTAQLAEVAAVEFACKKALKIDGPVLIVTDSFYVAESVNKELPYWQSNGFFNNKKKPLKHVSKWKSIADCIQLKPDIIIIHEKGHQPTASTFHTEGNNLADKLATQGSYVVNAGKRTADGSEFEKRTADGSEFESPKKKAKVE

SEQ ID NO: 7544 - protein, 2094 aa, synthetic construct
MPAAKRVKLDGGDKKYSIGLDIGTNSVGWAVITDEYKVPSKKFKVLGNTDRHSIKKNLIGALLFDSGETAEATRLKRTARRRYTRRKNRICYLQEIFSNEMAKVDDSFFHRLEESFLVEEDKKHERHPIFGNIVDEVAYHEKYPTIYHLRKKLVDSTDKADLRLIYLALAHMIKFRGHFLIEGDLNPDNSDVDKLFIQLVQTYNQLFEENPINASGVDAKAILSARLSKSRRLENLIAQLPGEKKNGLFGNLIALSLGLTPNFKSNFDLAEDAKLQLSKDTYDDDLDNLLAQIGDQYADLFLAAKNLSDAILLSDILRVNTEITKAPLSASMIKRYDEHHQDLTLLKALVRQQLPEKYKEIFFDQSKNGYAGYIDGGASQEEFYKFIKPILEKMDGTEELLVKLNREDLLRKQRTFDNGSIPHQIHLGELHAILRRQEDFYPFLKDNREKIEKILTFRIPYYVGPLARGNSRFAWMTRKSEETITPWNFEEVVDKGASAQSFIERMTNFDKNLPNEKVLPKHSLLYEYFTVYNELTKVKYVTEGMRKPAFLSGEQKKAIVDLLFKTNRKVTVKQLKEDYFKKIECFDSVEISGVEDRFNASLGTYHDLLKIIKDKDFLDNEENEDILEDIVLTLTLFEDREMIEERLKTYAHLFDDKVMKQLKRRRYTGWGRLSRKLINGIRDKQSGKTILDFLKSDGFANRNFMQLIHDDSLTFKEDIQKAQVSGQGDSLHEHIANLAGSPAIKKGILQTVKVVDELVKVMGRHKPENIVIEMARENQTTQKGQKNSRERMKRIEEGIKELGSQILKEHPVENTQLQNEKLYLYYLQNGRDMYVDQELDINRLSDYDVDHIVPQSFLKDDSIDNKVLTRSDKARGKSDNVPSEEVVKKMKNYWRQLLNAKLITQRKFDNLTKAERGGLSELDKAGFIKRQLVETRQITKHVAQILDSRMNTKYDENDKLIREVKVITLKSKLVSDFRKDFQFYKVREINNYHHAHDAYLNAVVGTALIKKYPKLESEFVYGDYKVYDVRKMIAKSEQEIGKATAKYFFYSNIMNFFKTEITLANGEIRKRPLIETNGETGEIVWDKGRDFATVRKVLSMPQVNIVKKTEVQTGGFSKESILPKRNSDKLIARKKDWDPKKYGGFDSPTVAYSVLVVAKVEKGKSKKLKSVKELLGITIMERSSFEKNPIDFLEAKGYKEVKKDLIIKLPKYSLFELENGRKRMLASAGELQKGNELALPSKYVNFLYLASHYEKLKGSPEDNEQKQLFVEQHKHYLDEIIEQISEFSKRVILADANLDKVLSAYNKHRDKPIREQAENIIHLFTLTNLGAPAAFKYFDTTIDRKRYTSTKEVLDATLIHQSITGLYETRIDLSQLGGDGGPAPGGGEAAAKGGVLNLEEEYRLHEKPVPSSIDPSWLQLFPTVWAERAGMGLANQVPPVVVELRSGASPVAVRQYPMSKEAREGIRPHIQRFLDLGVLVPCQSPWNTPLLPVKKPGTNDYRPVQDLREINKRVQDIHPTVPNPYNLLSSLPPSHTWYSVLDLKDAFFCLKLHPNSQPLFAFEWRDPEKGNTGQLTWTRLPQGFKNSPTLFNEALHRDLAPFRALNPQVVLLQYVDDLLVAAPTYRDCKEGTQKLLQELSKLGYRVSAKKAQLCQKEVTYLGYLLKEGKRWLTPARKATVMKIPPPTTPRQVREFLGTAGFCRLWIPGFASLAAPLYPLTKPSIPFIWTEEHQKAFDRIKEALLSAPALALPDLTKPFTLYVDERAGVARGVLTQTLGPWRRPVAYLSKKLDPVASGWPTCLKAVAAVALLLKDADKLTLGQNVTVIASHSLESIVRQPPDRWMTNARMTHYQSLLLNERVSFAPPAVLNPATLLPVESEATPVHRCSEILAEETGTRRDLKDQPLPGVPAWYTDGSSFIAEGKRRAGAAIVDGKRTVWASSLPEGTSAQKAELVALTQALRLAEGKDINIYTDSRYAFATAHIHGAIYKQRGWLTSAGKDIKNKEEILALLEAIHLPKRVAIIHCPGHQKGNDPVATGNRRADEAAKQAALSTRVLAETTKPAGKRTADGSEFEKRTADGSEFESPKKKAKVE

SEQ ID NO: 7545 - protein, 2094 aa, synthetic construct
MPAAKRVKLDGGDKKYSIGLDIGTNSVGWAVITDEYKVPSKKFKVLGNTDRHSIKKNLIGALLFDSGETAEATRLKRTARRRYTRRKNRICYLQEIFSNEMAKVDDSFFHRLEESFLVEEDKKHERHPIFGNIVDEVAYHEKYPTIYHLRKKLVDSTDKADLRLIYLALAHMIKFRGHFLIEGDLNPDNSDVDKLFIQLVQTYNQLFEENPINASGVDAKAILSARLSKSRRLENLIAQLPGEKKNGLFGNLIALSLGLTPNFKSNFDLAEDAKLQLSKDTYDDDLDNLLAQIGDQYADLFLAAKNLSDAILLSDILRVNTEITKAPLSASMIKRYDEHHQDLTLLKALVRQQLPEKYKEIFFDQSKNGYAGYIDGGASQEEFYKFIKPILEKMDGTEELLVKLNREDLLRKQRTFDNGSIPHQIHLGELHAILRRQEDFYPFLKDNREKIEKILTFRIPYYVGPLARGNSRFAWMTRKSEETITPWNFEEVVDKGASAQSFIERMTNFDKNLPNEKVLPKHSLLYEYFTVYNELTKVKYVTEGMRKPAFLSGEQKKAIVDLLFKTNRKVTVKQLKEDYFKKIECFDSVEISGVEDRFNASLGTYHDLLKIIKDKDFLDNEENEDILEDIVLTLTLFEDREMIEERLKTYAHLFDDKVMKQLKRRRYTGWGRLSRKLINGIRDKQSGKTILDFLKSDGFANRNFMQLIHDDSLTFKEDIQKAQVSGQGDSLHEHIANLAGSPAIKKGILQTVKVVDELVKVMGRHKPENIVIEMARENQTTQKGQKNSRERMKRIEEGIKELGSQILKEHPVENTQLQNEKLYLYYLQNGRDMYVDQELDINRLSDYDVDHIVPQSFLKDDSIDNKVLTRSDKARGKSDNVPSEEVVKKMKNYWRQLLNAKLITQRKFDNLTKAERGGLSELDKAGFIKRQLVETRQITKHVAQILDSRMNTKYDENDKLIREVKVITLKSKLVSDFRKDFQFYKVREINNYHHAHDAYLNAVVGTALIKKYPKLESEFVYGDYKVYDVRKMIAKSEQEIGKATAKYFFYSNIMNFFKTEITLANGEIRKRPLIETNGETGEIVWDKGRDFATVRKVLSMPQVNIVKKTEVQTGGFSKESILPKRNSDKLIARKKDWDPKKYGGFDSPTVAYSVLVVAKVEKGKSKKLKSVKELLGITIMERSSFEKNPIDFLEAKGYKEVKKDLIIKLPKYSLFELENGRKRMLASAGELQKGNELALPSKYVNFLYLASHYEKLKGSPEDNEQKQLFVEQHKHYLDEIIEQISEFSKRVILADANLDKVLSAYNKHRDKPIREQAENIIHLFTLTNLGAPAAFKYFDTTIDRKRYTSTKEVLDATLIHQSITGLYETRIDLSQLGGDGGPAPGGGEAAAKGGVLNLEEEYRLHEKPVPSSIDPSWLQLFPTVWAERAGMGLANQVPPVVVELRSGASPVAVRQYPMSKEAREGIRPHIQRFLDLGVLVPCQSPWNTPLLPVKKPGTNDYRPVQDLREINKRVQDIHPTVPNPYNLLSSLPPSHTWYSVLDLKDAFFCLKLHPNSQPLFAFEWRDPEKGNTGQLTWTRLPQGFKNSPTLFNEALHRDLAPFRALNPQVVLLQYVDDLLVAAPTYRDCKEGTQKLLQELSKLGYRVSAKKAQLCQKEVTYLGYLLKEGKRWLTPARKATVMKIPPPTTPRQVREFLGKAGFCRLFIPGFASLAAPLYPLTKPSIPFIWTEEHQKAFDRIKEALLSAPALALPDLTKPFTLYVDERAGVARGVLTQTLGPWRRPVAYLSKKLDPVASGWPTCLKAVAAVALLLKDADKLTLGQNVTVIASHSLESIVRQPPDRWMTNARMTHYQSLLLNERVSFAPPAVLNPATLLPVESEATPVHRCSEILAEETGTRRDLKDQPLPGVPAWYTDGSSFIAEGKRRAGAAIVDGKRTVWASSLPEGTSAQKAELVALTQALRLAEGKDINIYTDSRYAFATAHIHGAIYKQRGWLTSAGKDIKNKEEILALLEAIHLPKRVAIIHCPGHQKGNDPVATGNRRADEAAKQAALSTRVLAETTKPAGKRTADGSEFEKRTADGSEFESPKKKAKVE

SEQ ID NO: 7546 - protein, 2096 aa, synthetic construct
MPAAKRVKLDGGDKKYSIGLDIGTNSVGWAVITDEYKVPSKKFKVLGNTDRHSIKKNLIGALLFDSGETAEATRLKRTARRRYTRRKNRICYLQEIFSNEMAKVDDSFFHRLEESFLVEEDKKHERHPIFGNIVDEVAYHEKYPTIYHLRKKLVDSTDKADLRLIYLALAHMIKFRGHFLIEGDLNPDNSDVDKLFIQLVQTYNQLFEENPINASGVDAKAILSARLSKSRRLENLIAQLPGEKKNGLFGNLIALSLGLTPNFKSNFDLAEDAKLQLSKDTYDDDLDNLLAQIGDQYADLFLAAKNLSDAILLSDILRVNTEITKAPLSASMIKRYDEHHQDLTLLKALVRQQLPEKYKEIFFDQSKNGYAGYIDGGASQEEFYKFIKPILEKMDGTEELLVKLNREDLLRKQRTFDNGSIPHQIHLGELHAILRRQEDFYPFLKDNREKIEKILTFRIPYYVGPLARGNSRFAWMTRKSEETITPWNFEEVVDKGASAQSFIERMTNFDKNLPNEKVLPKHSLLYEYFTVYNELTKVKYVTEGMRKPAFLSGEQKKAIVDLLFKTNRKVTVKQLKEDYFKKIECFDSVEISGVEDRFNASLGTYHDLLKIIKDKDFLDNEENEDILEDIVLTLTLFEDREMIEERLKTYAHLFDDKVMKQLKRRRYTGWGRLSRKLINGIRDKQSGKTILDFLKSDGFANRNFMQLIHDDSLTFKEDIQKAQVSGQGDSLHEHIANLAGSPAIKKGILQTVKVVDELVKVMGRHKPENIVIEMARENQTTQKGQKNSRERMKRIEEGIKELGSQILKEHPVENTQLQNEKLYLYYLQNGRDMYVDQELDINRLSDYDVDHIVPQSFLKDDSIDNKVLTRSDKARGKSDNVPSEEVVKKMKNYWRQLLNAKLITQRKFDNLTKAERGGLSELDKAGFIKRQLVETRQITKHVAQILDSRMNTKYDENDKLIREVKVITLKSKLVSDFRKDFQFYKVREINNYHHAHDAYLNAVVGTALIKKYPKLESEFVYGDYKVYDVRKMIAKSEQEIGKATAKYFFYSNIMNFFKTEITLANGEIRKRPLIETNGETGEIVWDKGRDFATVRKVLSMPQVNIVKKTEVQTGGFSKESILPKRNSDKLIARKKDWDPKKYGGFDSPTVAYSVLVVAKVEKGKSKKLKSVKELLGITIMERSSFEKNPIDFLEAKGYKEVKKDLIIKLPKYSLFELENGRKRMLASAGELQKGNELALPSKYVNFLYLASHYEKLKGSPEDNEQKQLFVEQHKHYLDEIIEQISEFSKRVILADANLDKVLSAYNKHRDKPIREQAENIIHLFTLTNLGAPAAFKYFDTTIDRKRYTSTKEVLDATLIHQSITGLYETRIDLSQLGGDGGPAPGGGEAAAKGGTLNIEDEYRLHETSKEPDVPLGSTWLSDFPQAWAETGGMGLAVRQAPLIIPLKATSTPVSIKQYPMSQEARLGIKPHIQRLLDQGILVPCQSPWNTPLLPVKKPGTNDYRPVQDLREVNKRVEDIHPTVPNPYNLLSGLPPSHQWYTVLDLKDAFFCLRLHPTSQPLFAFEWRDPEMGISGQLTWTRLPQGFKNSPTLFNEALHRDLADFRIQHPDLILLQYVDDLLLAATSEQDCQRGTRALLQTLGNLGYRASAKKAQICQKQVKYLGYLLKEGQRWLTEARKETVMGQPTPKTPRQLREFLGTAGFCRLWIPGFAEMAAPLYPLTKPGTLFNWGPDQQKAYQEIKQALLTAPALGLPDLTKPFELFVDEKQGYAKGVLTQKLGPWRRPVAYLSKKLDPVAAGWPPCLRMVAAIAVLTKDAGKLTMGQPLVILAPHAVEALVKQPPDRWLSNARMTHYQAMLLDTDRVQFGPVVALNPATLLPLPEKEAPHDCLEILAETHGTRPDLTDQPIPDADYTWYTDGSSFLQEGQRRAGAAVTTETEVIWARALPAGTSAQRAELIALTQALKMAEGKKLNVYTDSRYAFATAHVHGEIYRRRGWLTSEGREIKNKNEILALLKALFLPKRLSIIHCPGHQKGNSAEARGNRMADQAAREAAMKAVLETSTLLAGKRTADGSEFEKRTADGSEFESPKKKAKVE

SEQ ID NO: 7547 - protein, 2096 aa, synthetic construct
MPAAKRVKLDGGDKKYSIGLDIGTNSVGWAVITDEYKVPSKKFKVLGNTDRHSIKKNLIGALLFDSGETAEATRLKRTARRRYTRRKNRICYLQEIFSNEMAKVDDSFFHRLEESFLVEEDKKHERHPIFGNIVDEVAYHEKYPTIYHLRKKLVDSTDKADLRLIYLALAHMIKFRGHFLIEGDLNPDNSDVDKLFIQLVQTYNQLFEENPINASGVDAKAILSARLSKSRRLENLIAQLPGEKKNGLFGNLIALSLGLTPNFKSNFDLAEDAKLQLSKDTYDDDLDNLLAQIGDQYADLFLAAKNLSDAILLSDILRVNTEITKAPLSASMIKRYDEHHQDLTLLKALVRQQLPEKYKEIFFDQSKNGYAGYIDGGASQEEFYKFIKPILEKMDGTEELLVKLNREDLLRKQRTFDNGSIPHQIHLGELHAILRRQEDFYPFLKDNREKIEKILTFRIPYYVGPLARGNSRFAWMTRKSEETITPWNFEEVVDKGASAQSFIERMTNFDKNLPNEKVLPKHSLLYEYFTVYNELTKVKYVTEGMRKPAFLSGEQKKAIVDLLFKTNRKVTVKQLKEDYFKKIECFDSVEISGVEDRFNASLGTYHDLLKIIKDKDFLDNEENEDILEDIVLTLTLFEDREMIEERLKTYAHLFDDKVMKQLKRRRYTGWGRLSRKLINGIRDKQSGKTILDFLKSDGFANRNFMQLIHDDSLTFKEDIQKAQVSGQGDSLHEHIANLAGSPAIKKGILQTVKVVDELVKVMGRHKPENIVIEMARENQTTQKGQKNSRERMKRIEEGIKELGSQILKEHPVENTQLQNEKLYLYYLQNGRDMYVDQELDINRLSDYDVDHIVPQSFLKDDSIDNKVLTRSDKARGKSDNVPSEEVVKKMKNYWRQLLNAKLITQRKFDNLTKAERGGLSELDKAGFIKRQLVETRQITKHVAQILDSRMNTKYDENDKLIREVKVITLKSKLVSDFRKDFQFYKVREINNYHHAHDAYLNAVVGTALIKKYPKLESEFVYGDYKVYDVRKMIAKSEQEIGKATAKYFFYSNIMNFFKTEITLANGEIRKRPLIETNGETGEIVWDKGRDFATVRKVLSMPQVNIVKKTEVQTGGFSKESILPKRNSDKLIARKKDWDPKKYGGFDSPTVAYSVLVVAKVEKGKSKKLKSVKELLGITIMERSSFEKNPIDFLEAKGYKEVKKDLIIKLPKYSLFELENGRKRMLASAGELQKGNELALPSKYVNFLYLASHYEKLKGSPEDNEQKQLFVEQHKHYLDEIIEQISEFSKRVILADANLDKVLSAYNKHRDKPIREQAENIIHLFTLTNLGAPAAFKYFDTTIDRKRYTSTKEVLDATLIHQSITGLYETRIDLSQLGGDGGPAPGGGEAAAKGGTLNIEDEYRLHETSKEPDVPLGSTWLSDFPQAWAETGGMGLAVRQAPLIIPLKATSTPVSIKQYPMSQEARLGIKPHIQRLLDQGILVPCQSPWNTPLLPVKKPGTNDYRPVQDLREVNKRVEDIHPTVPNPYNLLSGLPPSHQWYTVLDLKDAFFCLRLHPTSQPLFAFEWRDPEMGISGQLTWTRLPQGFKNSPTLFNEALHRDLADFRIQHPDLILLQYVDDLLLAATSEQDCQRGTRALLQTLGNLGYRASAKKAQICQKQVKYLGYLLKEGQRWLTEARKETVMGQPTPKTPRQLREFLGKAGFCRLFIPGFAEMAAPLYPLTKPGTLFNWGPDQQKAYQEIKQALLTAPALGLPDLTKPFELFVDEKQGYAKGVLTQKLGPWRRPVAYLSKKLDPVAAGWPPCLRMVAAIAVLTKDAGKLTMGQPLVILAPHAVEALVKQPPDRWLSNARMTHYQAMLLDTDRVQFGPVVALNPATLLPLPEKEAPHDCLEILAETHGTRPDLTDQPIPDADYTWYTDGSSFLQEGQRRAGAAVTTETEVIWARALPAGTSAQRAELIALTQALKMAEGKKLNVYTDSRYAFATAHVHGEIYRRRGWLTSEGREIKNKNEILALLKALFLPKRLSIIHCPGHQKGNSAEARGNRMADQAAREAAMKAVLETSTLLAGKRTADGSEFEKRTADGSEFESPKKKAKVE

SEQ ID NO: 7548 - protein, 2173 aa, synthetic construct
MPAAKRVKLDGGDKKYSIGLDIGTNSVGWAVITDEYKVPSKKFKVLGNTDRHSIKKNLIGALLFDSGETAEATRLKRTARRRYTRRKNRICYLQEIFSNEMAKVDDSFFHRLEESFLVEEDKKHERHPIFGNIVDEVAYHEKYPTIYHLRKKLVDSTDKADLRLIYLALAHMIKFRGHFLIEGDLNPDNSDVDKLFIQLVQTYNQLFEENPINASGVDAKAILSARLSKSRRLENLIAQLPGEKKNGLFGNLIALSLGLTPNFKSNFDLAEDAKLQLSKDTYDDDLDNLLAQIGDQYADLFLAAKNLSDAILLSDILRVNTEITKAPLSASMIKRYDEHHQDLTLLKALVRQQLPEKYKEIFFDQSKNGYAGYIDGGASQEEFYKFIKPILEKMDGTEELLVKLNREDLLRKQRTFDNGSIPHQIHLGELHAILRRQEDFYPFLKDNREKIEKILTFRIPYYVGPLARGNSRFAWMTRKSEETITPWNFEEVVDKGASAQSFIERMTNFDKNLPNEKVLPKHSLLYEYFTVYNELTKVKYVTEGMRKPAFLSGEQKKAIVDLLFKTNRKVTVKQLKEDYFKKIECFDSVEISGVEDRFNASLGTYHDLLKIIKDKDFLDNEENEDILEDIVLTLTLFEDREMIEERLKTYAHLFDDKVMKQLKRRRYTGWGRLSRKLINGIRDKQSGKTILDFLKSDGFANRNFMQLIHDDSLTFKEDIQKAQVSGQGDSLHEHIANLAGSPAIKKGILQTVKVVDELVKVMGRHKPENIVIEMARENQTTQKGQKNSRERMKRIEEGIKELGSQILKEHPVENTQLQNEKLYLYYLQNGRDMYVDQELDINRLSDYDVDHIVPQSFLKDDSIDNKVLTRSDKARGKSDNVPSEEVVKKMKNYWRQLLNAKLITQRKFDNLTKAERGGLSELDKAGFIKRQLVETRQITKHVAQILDSRMNTKYDENDKLIREVKVITLKSKLVSDFRKDFQFYKVREINNYHHAHDAYLNAVVGTALIKKYPKLESEFVYGDYKVYDVRKMIAKSEQEIGKATAKYFFYSNIMNFFKTEITLANGEIRKRPLIETNGETGEIVWDKGRDFATVRKVLSMPQVNIVKKTEVQTGGFSKESILPKRNSDKLIARKKDWDPKKYGGFDSPTVAYSVLVVAKVEKGKSKKLKSVKELLGITIMERSSFEKNPIDFLEAKGYKEVKKDLIIKLPKYSLFELENGRKRMLASAGELQKGNELALPSKYVNFLYLASHYEKLKGSPEDNEQKQLFVEQHKHYLDEIIEQISEFSKRVILADANLDKVLSAYNKHRDKPIREQAENIIHLFTLTNLGAPAAFKYFDTTIDRKRYTSTKEVLDATLIHQSITGLYETRIDLSQLGGDGGPAPEAAAKGGGGGMDLLKPLTVERKGVKIKGYWNSQADITCVPKDLLQGEEPVRQQNVTTIHGTQEGDVYYVNLKIDGRRINTEVIGTTLDYAIITPGDVPWILKKPLELTIKLDLEEQQGTLLNNSILSKKGKEELKQLFEKYSALWQSWENQVGHRRIRPHKIATGTVKPTPQKQYHINPKAKPDIQIVINDLLKQGVLIQKESTMNTPVYPVPKPNGRWRMVLDYRAVNKVTPLIAVQNQHSYGILGSLFKGRYKTTIDLSNGFWAHPIVPEDYWITAFTWQGKQYCWTVLPQGFLNSPGLFTGDVVDLLQGIPNVEVYVDDVYISHDSEKEHLEYLDILFNRLKEAGYIISLKKSNIANSIVDFLGFQITNEGRGLTDTFKEKLENITAPTTLKQLQSILGLLNFARNFIPDFTELIAPLYALIPKSTKNYVPWQIEHSTTLETLITKLNGAEYLQGRKGDKTLIMKVNASYTTGYIRYYNEGEKKPISYVSIVFSKTELKFTELEKLLTTVHKGLLKALDLSMGQNIHVYSPIVSMQNIQKTPQTAKKALASRWLSWLSYLEDPRIRFFYDPQMPALKDLPAVDTGKDNKKHPSNFQHIFYTDGSAITSPTKEGHLNAGMGIVYFINKDGNLQKQQEWSISLGNHTAQFAEIAAFEFALKKCLPLGGNILVVTDSNYVAKAYNEELDVWASNGFVNNRKKPLKHISKWKSVADLKRLRPDVVVTHEPGHQKLDSSPHAYGNNLADQLATQASFKVHAGKRTADGSEFEKRTADGSEFESPKKKAKVE

SEQ ID NO: 7549 - protein, 2087 aa, synthetic construct
MPAAKRVKLDGGDKKYSIGLDIGTNSVGWAVITDEYKVPSKKFKVLGNTDRHSIKKNLIGALLFDSGETAEATRLKRTARRRYTRRKNRICYLQEIFSNEMAKVDDSFFHRLEESFLVEEDKKHERHPIFGNIVDEVAYHEKYPTIYHLRKKLVDSTDKADLRLIYLALAHMIKFRGHFLIEGDLNPDNSDVDKLFIQLVQTYNQLFEENPINASGVDAKAILSARLSKSRRLENLIAQLPGEKKNGLFGNLIALSLGLTPNFKSNFDLAEDAKLQLSKDTYDDDLDNLLAQIGDQYADLFLAAKNLSDAILLSDILRVNTEITKAPLSASMIKRYDEHHQDLTLLKALVRQQLPEKYKEIFFDQSKNGYAGYIDGGASQEEFYKFIKPILEKMDGTEELLVKLNREDLLRKQRTFDNGSIPHQIHLGELHAILRRQEDFYPFLKDNREKIEKILTFRIPYYVGPLARGNSRFAWMTRKSEETITPWNFEEVVDKGASAQSFIERMTNFDKNLPNEKVLPKHSLLYEYFTVYNELTKVKYVTEGMRKPAFLSGEQKKAIVDLLFKTNRKVTVKQLKEDYFKKIECFDSVEISGVEDRFNASLGTYHDLLKIIKDKDFLDNEENEDILEDIVLTLTLFEDREMIEERLKTYAHLFDDKVMKQLKRRRYTGWGRLSRKLINGIRDKQSGKTILDFLKSDGFANRNFMQLIHDDSLTFKEDIQKAQVSGQGDSLHEHIANLAGSPAIKKGILQTVKVVDELVKVMGRHKPENIVIEMARENQTTQKGQKNSRERMKRIEEGIKELGSQILKEHPVENTQLQNEKLYLYYLQNGRDMYVDQELDINRLSDYDVDHIVPQSFLKDDSIDNKVLTRSDKARGKSDNVPSEEVVKKMKNYWRQLLNAKLITQRKFDNLTKAERGGLSELDKAGFIKRQLVETRQITKHVAQILDSRMNTKYDENDKLIREVKVITLKSKLVSDFRKDFQFYKVREINNYHHAHDAYLNAVVGTALIKKYPKLESEFVYGDYKVYDVRKMIAKSEQEIGKATAKYFFYSNIMNFFKTEITLANGEIRKRPLIETNGETGEIVWDKGRDFATVRKVLSMPQVNIVKKTEVQTGGFSKESILPKRNSDKLIARKKDWDPKKYGGFDSPTVAYSVLVVAKVEKGKSKKLKSVKELLGITIMERSSFEKNPIDFLEAKGYKEVKKDLIIKLPKYSLFELENGRKRMLASAGELQKGNELALPSKYVNFLYLASHYEKLKGSPEDNEQKQLFVEQHKHYLDEIIEQISEFSKRVILADANLDKVLSAYNKHRDKPIREQAENIIHLFTLTNLGAPAAFKYFDTTIDRKRYTSTKEVLDATLIHQSITGLYETRIDLSQLGGDGGPAPEAAAKGGGGGVPWILKKPLELTIKLDLEEQQGTLLNNSILSKKGKEELKQLFEKYSALWQSWENQVGHRRIRPHKIATGTVKPTPQKQYHINPKAKPDIQIVINDLLKQGVLIQKESTMNTPVYPVPKPNGRWRMVLDYRAVNKVTPLIAVQNQHSYGILGSLFKGRYKTTIDLSNGFWAHPIVPEDYWITAFTWQGKQYCWTVLPQGFLNSPGLFTGDVVDLLQGIPNVEVYVDDVYISHDSEKEHLEYLDILFNRLKEAGYIISLKKSNIANSIVDFLGFQITNEGRGLTDTFKEKLENITAPTTLKQLQSILGLLNFARNFIPDFTELIAPLYALIPKSTKNYVPWQIEHSTTLETLITKLNGAEYLQGRKGDKTLIMKVNASYTTGYIRYYNEGEKKPISYVSIVFSKTELKFTELEKLLTTVHKGLLKALDLSMGQNIHVYSPIVSMQNIQKTPQTAKKALASRWLSWLSYLEDPRIRFFYDPQMPALKDLPAVDTGKDNKKHPSNFQHIFYTDGSAITSPTKEGHLNAGMGIVYFINKDGNLQKQQEWSISLGNHTAQFAEIAAFEFALKKCLPLGGNILVVTDSNYVAKAYNEELDVWASNGFVNNRKKPLKHISKWKSVADLKRLRPDVVVTHEPGHQKLDSSPHAYGNNLADQLATQASFKVHAGKRTADGSEFEKRTADGSEFESPKKKAKVE

SEQ ID NO: 7550 - protein, 2095 aa, synthetic construct
MPAAKRVKLDGGDKKYSIGLDIGTNSVGWAVITDEYKVPSKKFKVLGNTDRHSIKKNLIGALLFDSGETAEATRLKRTARRRYTRRKNRICYLQEIFSNEMAKVDDSFFHRLEESFLVEEDKKHERHPIFGNIVDEVAYHEKYPTIYHLRKKLVDSTDKADLRLIYLALAHMIKFRGHFLIEGDLNPDNSDVDKLFIQLVQTYNQLFEENPINASGVDAKAILSARLSKSRRLENLIAQLPGEKKNGLFGNLIALSLGLTPNFKSNFDLAEDAKLQLSKDTYDDDLDNLLAQIGDQYADLFLAAKNLSDAILLSDILRVNTEITKAPLSASMIKRYDEHHQDLTLLKALVRQQLPEKYKEIFFDQSKNGYAGYIDGGASQEEFYKFIKPILEKMDGTEELLVKLNREDLLRKQRTFDNGSIPHQIHLGELHAILRRQEDFYPFLKDNREKIEKILTFRIPYYVGPLARGNSRFAWMTRKSEETITPWNFEEVVDKGASAQSFIERMTNFDKNLPNEKVLPKHSLLYEYFTVYNELTKVKYVTEGMRKPAFLSGEQKKAIVDLLFKTNRKVTVKQLKEDYFKKIECFDSVEISGVEDRFNASLGTYHDLLKIIKDKDFLDNEENEDILEDIVLTLTLFEDREMIEERLKTYAHLFDDKVMKQLKRRRYTGWGRLSRKLINGIRDKQSGKTILDFLKSDGFANRNFMQLIHDDSLTFKEDIQKAQVSGQGDSLHEHIANLAGSPAIKKGILQTVKVVDELVKVMGRHKPENIVIEMARENQTTQKGQKNSRERMKRIEEGIKELGSQILKEHPVENTQLQNEKLYLYYLQNGRDMYVDQELDINRLSDYDVDHIVPQSFLKDDSIDNKVLTRSDKARGKSDNVPSEEVVKKMKNYWRQLLNAKLITQRKFDNLTKAERGGLSELDKAGFIKRQLVETRQITKHVAQILDSRMNTKYDENDKLIREVKVITLKSKLVSDFRKDFQFYKVREINNYHHAHDAYLNAVVGTALIKKYPKLESEFVYGDYKVYDVRKMIAKSEQEIGKATAKYFFYSNIMNFFKTEITLANGEIRKRPLIETNGETGEIVWDKGRDFATVRKVLSMPQVNIVKKTEVQTGGFSKESILPKRNSDKLIARKKDWDPKKYGGFDSPTVAYSVLVVAKVEKGKSKKLKSVKELLGITIMERSSFEKNPIDFLEAKGYKEVKKDLIIKLPKYSLFELENGRKRMLASAGELQKGNELALPSKYVNFLYLASHYEKLKGSPEDNEQKQLFVEQHKHYLDEIIEQISEFSKRVILADANLDKVLSAYNKHRDKPIREQAENIIHLFTLTNLGAPAAFKYFDTTIDRKRYTSTKEVLDATLIHQSITGLYETRIDLSQLGGDGGPAPEAAAKGGGGGTLQLEEEYRLFEPESTQKQEMDIWLKNFPQAWAETGGMGTAHCQAPVLIQLKATATPISIRQYPMPHEAYQGIKPHIRRMLDQGILKPCQSPWNTPLLPVKKPGTEDYRPVQDLREVNKRVEDIHPTVPNPYNLLSTLPPSHPWYTVLDLKDAFFCLRLHSESQLLFAFEWRDPEIGLSGQLTWTRLPQGFKNSPTLFNEALHSDLADFRVRYPALVLLQYVDDLLLAAATRTECLEGTKALLETLGNKGYRASAKKAQICLQEVTYLGYSLKDGQRWLTKARKEAILSIPVPKNSRQVREFLGTAGYCRLWIPGFAELAAPLYPLTRPGTLFQWGTEQQLAFEDIKKALLSSPALGLPDITKPFELFIDENSGFAKGVLVQKLGPWKRPVAYLSKKLDTVASGWPPCLRMVAAIAILVKDAGKLTLGQPLTILTSHPVEALVRQPPNKWLSNARMTHYQAMLLDAERVHFGPTVSLNPATLLPLPSGGNHHDCLQILAETHGTRPDLTDQPLPDADLTWYTDGSSFIRNGEREAGAAVTTESEVIWAAPLPPGTSAQRAELIALTQALKMAEGKKLTVYTDSRYAFATTHVHGEIYRRRGWLTSEGKEIKNKNEILALLEALFLPKRLSIIHCPGHQKGDSPQAKGNRLADDTAKKAATETHSSLTVLPAGKRTADGSEFEKRTADGSEFESPKKKAKVE

SEQ ID NO: 7551 - protein, 2087 aa, synthetic construct
MPAAKRVKLDGGDKKYSIGLDIGTNSVGWAVITDEYKVPSKKFKVLGNTDRHSIKKNLIGALLFDSGETAEATRLKRTARRRYTRRKNRICYLQEIFSNEMAKVDDSFFHRLEESFLVEEDKKHERHPIFGNIVDEVAYHEKYPTIYHLRKKLVDSTDKADLRLIYLALAHMIKFRGHFLIEGDLNPDNSDVDKLFIQLVQTYNQLFEENPINASGVDAKAILSARLSKSRRLENLIAQLPGEKKNGLFGNLIALSLGLTPNFKSNFDLAEDAKLQLSKDTYDDDLDNLLAQIGDQYADLFLAAKNLSDAILLSDILRVNTEITKAPLSASMIKRYDEHHQDLTLLKALVRQQLPEKYKEIFFDQSKNGYAGYIDGGASQEEFYKFIKPILEKMDGTEELLVKLNREDLLRKQRTFDNGSIPHQIHLGELHAILRRQEDFYPFLKDNREKIEKILTFRIPYYVGPLARGNSRFAWMTRKSEETITPWNFEEVVDKGASAQSFIERMTNFDKNLPNEKVLPKHSLLYEYFTVYNELTKVKYVTEGMRKPAFLSGEQKKAIVDLLFKTNRKVTVKQLKEDYFKKIECFDSVEISGVEDRFNASLGTYHDLLKIIKDKDFLDNEENEDILEDIVLTLTLFEDREMIEERLKTYAHLFDDKVMKQLKRRRYTGWGRLSRKLINGIRDKQSGKTILDFLKSDGFANRNFMQLIHDDSLTFKEDIQKAQVSGQGDSLHEHIANLAGSPAIKKGILQTVKVVDELVKVMGRHKPENIVIEMARENQTTQKGQKNSRERMKRIEEGIKELGSQILKEHPVENTQLQNEKLYLYYLQNGRDMYVDQELDINRLSDYDVDHIVPQSFLKDDSIDNKVLTRSDKARGKSDNVPSEEVVKKMKNYWRQLLNAKLITQRKFDNLTKAERGGLSELDKAGFIKRQLVETRQITKHVAQILDSRMNTKYDENDKLIREVKVITLKSKLVSDFRKDFQFYKVREINNYHHAHDAYLNAVVGTALIKKYPKLESEFVYGDYKVYDVRKMIAKSEQEIGKATAKYFFYSNIMNFFKTEITLANGEIRKRPLIETNGETGEIVWDKGRDFATVRKVLSMPQVNIVKKTEVQTGGFSKESILPKRNSDKLIARKKDWDPKKYGGFDSPTVAYSVLVVAKVEKGKSKKLKSVKELLGITIMERSSFEKNPIDFLEAKGYKEVKKDLIIKLPKYSLFELENGRKRMLASAGELQKGNELALPSKYVNFLYLASHYEKLKGSPEDNEQKQLFVEQHKHYLDEIIEQISEFSKRVILADANLDKVLSAYNKHRDKPIREQAENIIHLFTLTNLGAPAAFKYFDTTIDRKRYTSTKEVLDATLIHQSITGLYETRIDLSQLGGDGGPAPEAAAKGGGGGVPWLTQQPLQLTILVPLQEYQEKILSKTALPEDQKQQLKTLFVKYDNLWQHWENQVGHRKIRPHNIATGDYPPRPQKQYPINPKAKPSIQIVIDDLLKQGVLTPQNSTMNTPVYPVPKPDGRWRMVLDYREVNKTIPLTAAQNQHSAGILATIVRQKYKTTLDLANGFWAHPITPESYWLTAFTWQGKQYCWTRLPQGFLNSPALFNADVVDLLKEIPNVQVYVDDIYLSHDDPKEHVQQLEKVFQILLQAGYVVSLKKSEIGQKTVEFLGFNITKEGRGLTDTFKTKLLNITPPKDLKQLQSILGKLNFARNFIPNFAELVQPLYNLIAPAKGKYIEWSEENTKQLNMVIEALNTASNLEERLPEQRLVIKVNTSPSAGYVRYYNETGKKPIMYLNYVFSKAELKFSMLEKLLTTMHKALIKAMDLAMGQEILVYSPIVSMTKIQKTPLPERKALPIRWITWMTYLEDPRIQFHYDKTLPELKHIPDVYTSSQSPVKHPSQYEGVFYTDGSAIKSPDPTKSNNAGMGIVHATYKPEYQVLNQWSIPLGNHTAQMAEIAAVEFACKKALKIPGPVLVITDSFYVAESANKELPYWKSNGFVNNKKKPLKHISKWKSIAECLSMKPDITIQHEKGISLQIPVFILKGNALADKLATQGSYVVNAGKRTADGSEFEKRTADGSEFESPKKKAKVE

SEQ ID NO: 7552 - protein, 2176 aa, synthetic construct
MPAAKRVKLDGGDKKYSIGLDIGTNSVGWAVITDEYKVPSKKFKVLGNTDRHSIKKNLIGALLFDSGETAEATRLKRTARRRYTRRKNRICYLQEIFSNEMAKVDDSFFHRLEESFLVEEDKKHERHPIFGNIVDEVAYHEKYPTIYHLRKKLVDSTDKADLRLIYLALAHMIKFRGHFLIEGDLNPDNSDVDKLFIQLVQTYNQLFEENPINASGVDAKAILSARLSKSRRLENLIAQLPGEKKNGLFGNLIALSLGLTPNFKSNFDLAEDAKLQLSKDTYDDDLDNLLAQIGDQYADLFLAAKNLSDAILLSDILRVNTEITKAPLSASMIKRYDEHHQDLTLLKALVRQQLPEKYKEIFFDQSKNGYAGYIDGGASQEEFYKFIKPILEKMDGTEELLVKLNREDLLRKQRTFDNGSIPHQIHLGELHAILRRQEDFYPFLKDNREKIEKILTFRIPYYVGPLARGNSRFAWMTRKSEETITPWNFEEVVDKGASAQSFIERMTNFDKNLPNEKVLPKHSLLYEYFTVYNELTKVKYVTEGMRKPAFLSGEQKKAIVDLLFKTNRKVTVKQLKEDYFKKIECFDSVEISGVEDRFNASLGTYHDLLKIIKDKDFLDNEENEDILEDIVLTLTLFEDREMIEERLKTYAHLFDDKVMKQLKRRRYTGWGRLSRKLINGIRDKQSGKTILDFLKSDGFANRNFMQLIHDDSLTFKEDIQKAQVSGQGDSLHEHIANLAGSPAIKKGILQTVKVVDELVKVMGRHKPENIVIEMARENQTTQKGQKNSRERMKRIEEGIKELGSQILKEHPVENTQLQNEKLYLYYLQNGRDMYVDQELDINRLSDYDVDHIVPQSFLKDDSIDNKVLTRSDKARGKSDNVPSEEVVKKMKNYWRQLLNAKLITQRKFDNLTKAERGGLSELDKAGFIKRQLVETRQITKHVAQILDSRMNTKYDENDKLIREVKVITLKSKLVSDFRKDFQFYKVREINNYHHAHDAYLNAVVGTALIKKYPKLESEFVYGDYKVYDVRKMIAKSEQEIGKATAKYFFYSNIMNFFKTEITLANGEIRKRPLIETNGETGEIVWDKGRDFATVRKVLSMPQVNIVKKTEVQTGGFSKESILPKRNSDKLIARKKDWDPKKYGGFDSPTVAYSVLVVAKVEKGKSKKLKSVKELLGITIMERSSFEKNPIDFLEAKGYKEVKKDLIIKLPKYSLFELENGRKRMLASAGELQKGNELALPSKYVNFLYLASHYEKLKGSPEDNEQKQLFVEQHKHYLDEIIEQISEFSKRVILADANLDKVLSAYNKHRDKPIREQAENIIHLFTLTNLGAPAAFKYFDTTIDRKRYTSTKEVLDATLIHQSITGLYETRIDLSQLGGDGGPAPEAAAKGGGGGMNPLQLLQPLPAEIKGTKLLAHWNSGATITCIPESFLEDEQPIKKTLIKTIHGEKQQNVYYVTFKVKGRKVEAEVIASPYEYILLSPTDVPWLTQQPLQLTILVPLQEYQEKILSKTALPEDQKQQLKTLFVKYDNLWQHWENQVGHRKIRPHNIATGDYPPRPQKQYPINPKAKPSIQIVIDDLLKQGVLTPQNSTMNTPVYPVPKPDGRWRMVLDYREVNKTIPLTAAQNQHSAGILATIVRQKYKTTLDLANGFWAHPITPESYWLTAFTWQGKQYCWTRLPQGFLNSPALFNADVVDLLKEIPNVQVYVDDIYLSHDDPKEHVQQLEKVFQILLQAGYVVSLKKSEIGQKTVEFLGFNITKEGRGLTDTFKTKLLNITPPKDLKQLQSILGLLNFARNFIPNFAELVQPLYNLIAPAKGKYIEWSEENTKQLNMVIEALNTASNLEERLPEQRLVIKVNTSPSAGYVRYYNETGKKPIMYLNYVFSKAELKFSMLEKLLTTMHKALIKAMDLAMGQEILVYSPIVSMTKIQKTPLPERKALPIRWITWMTYLEDPRIQFHYDKTLPELKHIPDVYTSSQSPVKHPSQYEGVFYTDGSAIKSPDPTKSNNAGMGIVHATYKPEYQVLNQWSIPLGNHTAQMAEIAAVEFACKKALKIPGPVLVITDSFYVAESANKELPYWKSNGFVNNKKKPLKHISKWKSIAECLSMKPDITIQHEKGISLQIPVFILKGNALADKLATQGSYVVNAGKRTADGSEFEKRTADGSEFESPKKKAKVE

SEQ ID NO: 7553 - protein, 2176 aa, synthetic construct
MPAAKRVKLDGGDKKYSIGLDIGTNSVGWAVITDEYKVPSKKFKVLGNTDRHSIKKNLIGALLFDSGETAEATRLKRTARRRYTRRKNRICYLQEIFSNEMAKVDDSFFHRLEESFLVEEDKKHERHPIFGNIVDEVAYHEKYPTIYHLRKKLVDSTDKADLRLIYLALAHMIKFRGHFLIEGDLNPDNSDVDKLFIQLVQTYNQLFEENPINASGVDAKAILSARLSKSRRLENLIAQLPGEKKNGLFGNLIALSLGLTPNFKSNFDLAEDAKLQLSKDTYDDDLDNLLAQIGDQYADLFLAAKNLSDAILLSDILRVNTEITKAPLSASMIKRYDEHHQDLTLLKALVRQQLPEKYKEIFFDQSKNGYAGYIDGGASQEEFYKFIKPILEKMDGTEELLVKLNREDLLRKQRTFDNGSIPHQIHLGELHAILRRQEDFYPFLKDNREKIEKILTFRIPYYVGPLARGNSRFAWMTRKSEETITPWNFEEVVDKGASAQSFIERMTNFDKNLPNEKVLPKHSLLYEYFTVYNELTKVKYVTEGMRKPAFLSGEQKKAIVDLLFKTNRKVTVKQLKEDYFKKIECFDSVEISGVEDRFNASLGTYHDLLKIIKDKDFLDNEENEDILEDIVLTLTLFEDREMIEERLKTYAHLFDDKVMKQLKRRRYTGWGRLSRKLINGIRDKQSGKTILDFLKSDGFANRNFMQLIHDDSLTFKEDIQKAQVSGQGDSLHEHIANLAGSPAIKKGILQTVKVVDELVKVMGRHKPENIVIEMARENQTTQKGQKNSRERMKRIEEGIKELGSQILKEHPVENTQLQNEKLYLYYLQNGRDMYVDQELDINRLSDYDVDHIVPQSFLKDDSIDNKVLTRSDKARGKSDNVPSEEVVKKMKNYWRQLLNAKLITQRKFDNLTKAERGGLSELDKAGFIKRQLVETRQITKHVAQILDSRMNTKYDENDKLIREVKVITLKSKLVSDFRKDFQFYKVREINNYHHAHDAYLNAVVGTALIKKYPKLESEFVYGDYKVYDVRKMIAKSEQEIGKATAKYFFYSNIMNFFKTEITLANGEIRKRPLIETNGETGEIVWDKGRDFATVRKVLSMPQVNIVKKTEVQTGGFSKESILPKRNSDKLIARKKDWDPKKYGGFDSPTVAYSVLVVAKVEKGKSKKLKSVKELLGITIMERSSFEKNPIDFLEAKGYKEVKKDLIIKLPKYSLFELENGRKRMLASAGELQKGNELALPSKYVNFLYLASHYEKLKGSPEDNEQKQLFVEQHKHYLDEIIEQISEFSKRVILADANLDKVLSAYNKHRDKPIREQAENIIHLFTLTNLGAPAAFKYFDTTIDRKRYTSTKEVLDATLIHQSITGLYETRIDLSQLGGDGGPAPEAAAKGGGGGMNPLQLLQPLPAEIKGTKLLAHWNSGATITCIPESFLEDEQPIKKTLIKTIHGEKQQNVYYVTFKVKGRKVEAEVIASPYEYILLSPTDVPWLTQQPLQLTILVPLQEYQEKILSKTALPEDQKQQLKTLFVKYDNLWQHWENQVGHRKIRPHNIATGDYPPRPQKQYPINPKAKPSIQIVIDDLLKQGVLTPQNSTMNTPVYPVPKPDGRWRMVLDYREVNKTIPLTAAQNQHSAGILATIVRQKYKTTLDLANGFWAHPITPESYWLTAFTWQGKQYCWTRLPQGFLNSPALFNADVVDLLKEIPNVQVYVDDIYLSHDDPKEHVQQLEKVFQILLQAGYVVSLKKSEIGQKTVEFLGFNITKEGRGLTDTFKTKLLNITPPKDLKQLQSILGKLNFARNFIPNFAELVQPLYNLIAPAKGKYIEWSEENTKQLNMVIEALNTASNLEERLPEQRLVIKVNTSPSAGYVRYYNETGKKPIMYLNYVFSKAELKFSMLEKLLTTMHKALIKAMDLAMGQEILVYSPIVSMTKIQKTPLPERKALPIRWITWMTYLEDPRIQFHYDKTLPELKHIPDVYTSSQSPVKHPSQYEGVFYTDGSAIKSPDPTKSNNAGMGIVHATYKPEYQVLNQWSIPLGNHTAQMAEIAAVEFACKKALKIPGPVLVITDSFYVAESANKELPYWKSNGFVNNKKKPLKHISKWKSIAECLSMKPDITIQHEKGISLQIPVFILKGNALADKLATQGSYVVNAGKRTADGSEFEKRTADGSEFESPKKKAKVE

SEQ ID NO: 7554 - protein, 2094 aa, synthetic construct
MPAAKRVKLDGGDKKYSIGLDIGTNSVGWAVITDEYKVPSKKFKVLGNTDRHSIKKNLIGALLFDSGETAEATRLKRTARRRYTRRKNRICYLQEIFSNEMAKVDDSFFHRLEESFLVEEDKKHERHPIFGNIVDEVAYHEKYPTIYHLRKKLVDSTDKADLRLIYLALAHMIKFRGHFLIEGDLNPDNSDVDKLFIQLVQTYNQLFEENPINASGVDAKAILSARLSKSRRLENLIAQLPGEKKNGLFGNLIALSLGLTPNFKSNFDLAEDAKLQLSKDTYDDDLDNLLAQIGDQYADLFLAAKNLSDAILLSDILRVNTEITKAPLSASMIKRYDEHHQDLTLLKALVRQQLPEKYKEIFFDQSKNGYAGYIDGGASQEEFYKFIKPILEKMDGTEELLVKLNREDLLRKQRTFDNGSIPHQIHLGELHAILRRQEDFYPFLKDNREKIEKILTFRIPYYVGPLARGNSRFAWMTRKSEETITPWNFEEVVDKGASAQSFIERMTNFDKNLPNEKVLPKHSLLYEYFTVYNELTKVKYVTEGMRKPAFLSGEQKKAIVDLLFKTNRKVTVKQLKEDYFKKIECFDSVEISGVEDRFNASLGTYHDLLKIIKDKDFLDNEENEDILEDIVLTLTLFEDREMIEERLKTYAHLFDDKVMKQLKRRRYTGWGRLSRKLINGIRDKQSGKTILDFLKSDGFANRNFMQLIHDDSLTFKEDIQKAQVSGQGDSLHEHIANLAGSPAIKKGILQTVKVVDELVKVMGRHKPENIVIEMARENQTTQKGQKNSRERMKRIEEGIKELGSQILKEHPVENTQLQNEKLYLYYLQNGRDMYVDQELDINRLSDYDVDHIVPQSFLKDDSIDNKVLTRSDKARGKSDNVPSEEVVKKMKNYWRQLLNAKLITQRKFDNLTKAERGGLSELDKAGFIKRQLVETRQITKHVAQILDSRMNTKYDENDKLIREVKVITLKSKLVSDFRKDFQFYKVREINNYHHAHDAYLNAVVGTALIKKYPKLESEFVYGDYKVYDVRKMIAKSEQEIGKATAKYFFYSNIMNFFKTEITLANGEIRKRPLIETNGETGEIVWDKGRDFATVRKVLSMPQVNIVKKTEVQTGGFSKESILPKRNSDKLIARKKDWDPKKYGGFDSPTVAYSVLVVAKVEKGKSKKLKSVKELLGITIMERSSFEKNPIDFLEAKGYKEVKKDLIIKLPKYSLFELENGRKRMLASAGELQKGNELALPSKYVNFLYLASHYEKLKGSPEDNEQKQLFVEQHKHYLDEIIEQISEFSKRVILADANLDKVLSAYNKHRDKPIREQAENIIHLFTLTNLGAPAAFKYFDTTIDRKRYTSTKEVLDATLIHQSITGLYETRIDLSQLGGDGGPAPEAAAKGGGGGVLNLEEEYRLHEKPVPSSIDPSWLQLFPTVWAERAGMGLANQVPPVVVELRSGASPVAVRQYPMSKEAREGIRPHIQKFLDLGVLVPCRSPWNTPLLPVKKPGTNDYRPVQDLREINKRVQDIHPTVPNPYNLLSSLPPSYTWYSVLDLKDAFFCLRLHPNSQPLFAFEWKDPEKGNTGQLTWTRLPQGFKNSPTLFNEALHRDLAPFRALNPQVVLLQYVDDLLVAAPTYEDCKKGTQKLLQELSKLGYRVSAKKAQLCQREVTYLGYLLKEGKRWLTPARKATVMKIPVPTTPRQVREFLGKAGFCRLFIPGFASLAAPLYPLTKPSIPFIWTEEHQQAFDHIKKALLSAPALALPDLTKPFTLYIDERAGVARGVLTQTLGPWRRPVAYLSKKLDPVASGWPTCLKAVAAVALLLKDADKLTLGQNVTVIASHSLESIVRQPPDRWMTNARMTHYQSLLLNERVSFAPPAVLNPATLLPVESEATPVHRCSEILAEETGTRRDLEDQPLPGVPTWYTDGSSFITEGKRRAGAPIVDGKRTVWASSLPEGTSAQKAELVALTQALRLAEGKNINIYTDSRYAFATAHIHGAIYKQRGWLTSAGKDIKNKEEILALLEAIHLPRRVAIIHCPGHQRGSNPVATGNRRADEAAKQAALSTRVLAGTTKPAGKRTADGSEFEKRTADGSEFESPKKKAKVE

SEQ ID NO: 7555 - protein, 2127 aa, synthetic construct; identical to SEQ ID NO: 4537

SEQ ID NO: 7556 - protein, 2218 aa, synthetic construct
MPAAKRVKLDGGDKKYSIGLDIGTNSVGWAVITDEYKVPSKKFKVLGNTDRHSIKKNLIGALLFDSGETAEATRLKRTARRRYTRRKNRICYLQEIFSNEMAKVDDSFFHRLEESFLVEEDKKHERHPIFGNIVDEVAYHEKYPTIYHLRKKLVDSTDKADLRLIYLALAHMIKFRGHFLIEGDLNPDNSDVDKLFIQLVQTYNQLFEENPINASGVDAKAILSARLSKSRRLENLIAQLPGEKKNGLFGNLIALSLGLTPNFKSNFDLAEDAKLQLSKDTYDDDLDNLLAQIGDQYADLFLAAKNLSDAILLSDILRVNTEITKAPLSASMIKRYDEHHQDLTLLKALVRQQLPEKYKEIFFDQSKNGYAGYIDGGASQEEFYKFIKPILEKMDGTEELLVKLNREDLLRKQRTFDNGSIPHQIHLGELHAILRRQEDFYPFLKDNREKIEKILTFRIPYYVGPLARGNSRFAWMTRKSEETITPWNFEEVVDKGASAQSFIERMTNFDKNLPNEKVLPKHSLLYEYFTVYNELTKVKYVTEGMRKPAFLSGEQKKAIVDLLFKTNRKVTVKQLKEDYFKKIECFDSVEISGVEDRFNASLGTYHDLLKIIKDKDFLDNEENEDILEDIVLTLTLFEDREMIEERLKTYAHLFDDKVMKQLKRRRYTGWGRLSRKLINGIRDKQSGKTILDFLKSDGFANRNFMQLIHDDSLTFKEDIQKAQVSGQGDSLHEHIANLAGSPAIKKGILQTVKVVDELVKVMGRHKPENIVIEMARENQTTQKGQKNSRERMKRIEEGIKELGSQILKEHPVENTQLQNEKLYLYYLQNGRDMYVDQELDINRLSDYDVDHIVPQSFLKDDSIDNKVLTRSDKARGKSDNVPSEEVVKKMKNYWRQLLNAKLITQRKFDNLTKAERGGLSELDKAGFIKRQLVETRQITKHVAQILDSRMNTKYDENDKLIREVKVITLKSKLVSDFRKDFQFYKVREINNYHHAHDAYLNAVVGTALIKKYPKLESEFVYGDYKVYDVRKMIAKSEQEIGKATAKYFFYSNIMNFFKTEITLANGEIRKRPLIETNGETGEIVWDKGRDFATVRKVLSMPQVNIVKKTEVQTGGFSKESILPKRNSDKLIARKKDWDPKKYGGFDSPTVAYSVLVVAKVEKGKSKKLKSVKELLGITIMERSSFEKNPIDFLEAKGYKEVKKDLIIKLPKYSLFELENGRKRMLASAGELQKGNELALPSKYVNFLYLASHYEKLKGSPEDNEQKQLFVEQHKHYLDEIIEQISEFSKRVILADANLDKVLSAYNKHRDKPIREQAENIIHLFTLTNLGAPAAFKYFDTTIDRKRYTSTKEVLDATLIHQSITGLYETRIDLSQLGGDGGPAPEAAAKGGGGGTLGDQGSRGSDPLPEPRVTLTVEGIPTEFLVNTGAEHSVLTKPMGKMGSKRTVVAGATGSKVYPWTTKRLLKIGQKQVTHSFLVIPECPAPLLGRDLLTKLKAQIQFSTEGPQVTWEDRPAMCLVLNLEEEYRLHEKPVPPSIDPSWLQLFPMVWAEKAGMGLANQVPPVVVELKSDASPVAVRQYPMSKEAREGIRPHIQRFLDLGILVPCQSPWNTPLLPVKKPGTNDYRPVQDLREVNKRVQDIHPTVPNPYNLLSSLPPSHTWYSVLDLKDAFFCLKLHPNSQPLFAFEWRDPEKGNTGQLTWTRLPQGFKNSPTLFNEALHRDLASFRALNPQVVMLQYVDDLLVAAPTYRDCKEGTRRLLQELSKLGYRVSAKKAQLCREEVTYLGYLLKGGKRWLTPARKATVMKIPTPTTPRQVREFLGTAGFCRLWIPGFASLAAPLYPLTRPKVPFTWTEAHQEAFGRIKEALLSAPALALPDLTKPFALYVDEKEGVARGVLTQTLGPWRRPVAYLSKKLDPVASGWPTCLKAIAAVALLLKDADKLTLGQNVLVIAPHNLESIVRQPPDRWMTNARMTHYQSLLLNERVSFAPPAILNPATLLPVESDDTPIHICSEILAEETGTRPDLRDQPLPGVPAWYTDGSSFIMDGRRQAGAAIVDNKRTVWASNLPEGTSAQKAELIALTQALRLAEGKSINIYTDSRYAFATAHVHGAIYKQRGWLTSAGKDIKNKEEILALLEAIHLPKRVAIIHCPGHQRGTDPVATGNRKADEAAKQAAQSTRILTETTKNAGKRTADGSEFEKRTADGSEFESPKKKAKVE

SEQ ID NO: 7557 - protein, 2218 aa, synthetic construct
MPAAKRVKLDGGDKKYSIGLDIGTNSVGWAVITDEYKVPSKKFKVLGNTDRHSIKKNLIGALLFDSGETAEATRLKRTARRRYTRRKNRICYLQEIFSNEMAKVDDSFFHRLEESFLVEEDKKHERHPIFGNIVDEVAYHEKYPTIYHLRKKLVDSTDKADLRLIYLALAHMIKFRGHFLIEGDLNPDNSDVDKLFIQLVQTYNQLFEENPINASGVDAKAILSARLSKSRRLENLIAQLPGEKKNGLFGNLIALSLGLTPNFKSNFDLAEDAKLQLSKDTYDDDLDNLLAQIGDQYADLFLAAKNLSDAILLSDILRVNTEITKAPLSASMIKRYDEHHQDLTLLKALVRQQLPEKYKEIFFDQSKNGYAGYIDGGASQEEFYKFIKPILEKMDGTEELLVKLNREDLLRKQRTFDNGSIPHQIHLGELHAILRRQEDFYPFLKDNREKIEKILTFRIPYYVGPLARGNSRFAWMTRKSEETITPWNFEEVVDKGASAQSFIERMTNFDKNLPNEKVLPKHSLLYEYFTVYNELTKVKYVTEGMRKPAFLSGEQKKAIVDLLFKTNRKVTVKQLKEDYFKKIECFDSVEISGVEDRFNASLGTYHDLLKIIKDKDFLDNEENEDILEDIVLTLTLFEDREMIEERLKTYAHLFDDKVMKQLKRRRYTGWGRLSRKLINGIRDKQSGKTILDFLKSDGFANRNFMQLIHDDSLTFKEDIQKAQVSGQGDSLHEHIANLAGSPAIKKGILQTVKVVDELVKVMGRHKPENIVIEMARENQTTQKGQKNSRERMKRIEEGIKELGSQILKEHPVENTQLQNEKLYLYYLQNGRDMYVDQELDINRLSDYDVDHIVPQSFLKDDSIDNKVLTRSDKARGKSDNVPSEEVVKKMKNYWRQLLNAKLITQRKFDNLTKAERGGLSELDKAGFIKRQLVETRQITKHVAQILDSRMNTKYDENDKLIREVKVITLKSKLVSDFRKDFQFYKVREINNYHHAHDAYLNAVVGTALIKKYPKLESEFVYGDYKVYDVRKMIAKSEQEIGKATAKYFFYSNIMNFFKTEITLANGEIRKRPLIETNGETGEIVWDKGRDFATVRKVLSMPQVNIVKKTEVQTGGFSKESILPKRNSDKLIARKKDWDPKKYGGFDSPTVAYSVLVVAKVEKGKSKKLKSVKELLGITIMERSSFEKNPIDFLEAKGYKEVKKDLIIKLPKYSLFELENGRKRMLASAGELQKGNELALPSKYVNFLYLASHYEKLKGSPEDNEQKQLFVEQHKHYLDEIIEQISEFSKRVILADANLDKVLSAYNKHRDKPIREQAENIIHLFTLTNLGAPAAFKYFDTTIDRKRYTSTKEVLDATLIHQSITGLYETRIDLSQLGGDGGPAPEAAAKGGGGGTLGDQGSRGSDPLPEPRVTLTVEGIPTEFLVNTGAEHSVLTKPMGKMGSKRTVVAGATGSKVYPWTTKRLLKIGQKQVTHSFLVIPECPAPLLGRDLLTKLKAQIQFSTEGPQVTWEDRPAMCLVLNLEEEYRLHEKPVPPSIDPSWLQLFPMVWAEKAGMGLANQVPPVVVELKSDASPVAVRQYPMSKEAREGIRPHIQRFLDLGILVPCQSPWNTPLLPVKKPGTNDYRPVQDLREVNKRVQDIHPTVPNPYNLLSSLPPSHTWYSVLDLKDAFFCLKLHPNSQPLFAFEWRDPEKGNTGQLTWTRLPQGFKNSPTLFNEALHRDLASFRALNPQVVMLQYVDDLLVAAPTYRDCKEGTRRLLQELSKLGYRVSAKKAQLCREEVTYLGYLLKGGKRWLTPARKATVMKIPTPTTPRQVREFLGKAGFCRLFIPGFASLAAPLYPLTRPKVPFTWTEAHQEAFGRIKEALLSAPALALPDLTKPFALYVDEKEGVARGVLTQTLGPWRRPVAYLSKKLDPVASGWPTCLKAIAAVALLLKDADKLTLGQNVLVIAPHNLESIVRQPPDRWMTNARMTHYQSLLLNERVSFAPPAILNPATLLPVESDDTPIHICSEILAEETGTRPDLRDQPLPGVPAWYTDGSSFIMDGRRQAGAAIVDNKRTVWASNLPEGTSAQKAELIALTQALRLAEGKSINIYTDSRYAFATAHVHGAIYKQRGWLTSAGKDIKNKEEILALLEAIHLPKRVAIIHCPGHQRGTDPVATGNRKADEAAKQAAQSTRILTETTKNAGKRTADGSEFEKRTADGSEFESPKKKAKVE

SEQ ID NO: 7558 - protein, 2096 aa, synthetic construct
MPAAKRVKLDGGDKKYSIGLDIGTNSVGWAVITDEYKVPSKKFKVLGNTDRHSIKKNLIGALLFDSGETAEATRLKRTARRRYTRRKNRICYLQEIFSNEMAKVDDSFFHRLEESFLVEEDKKHERHPIFGNIVDEVAYHEKYPTIYHLRKKLVDSTDKADLRLIYLALAHMIKFRGHFLIEGDLNPDNSDVDKLFIQLVQTYNQLFEENPINASGVDAKAILSARLSKSRRLENLIAQLPGEKKNGLFGNLIALSLGLTPNFKSNFDLAEDAKLQLSKDTYDDDLDNLLAQIGDQYADLFLAAKNLSDAILLSDILRVNTEITKAPLSASMIKRYDEHHQDLTLLKALVRQQLPEKYKEIFFDQSKNGYAGYIDGGASQEEFYKFIKPILEKMDGTEELLVKLNREDLLRKQRTFDNGSIPHQIHLGELHAILRRQEDFYPFLKDNREKIEKILTFRIPYYVGPLARGNSRFAWMTRKSEETITPWNFEEVVDKGASAQSFIERMTNFDKNLPNEKVLPKHSLLYEYFTVYNELTKVKYVTEGMRKPAFLSGEQKKAIVDLLFKTNRKVTVKQLKEDYFKKIECFDSVEISGVEDRFNASLGTYHDLLKIIKDKDFLDNEENEDILEDIVLTLTLFEDREMIEERLKTYAHLFDDKVMKQLKRRRYTGWGRLSRKLINGIRDKQSGKTILDFLKSDGFANRNFMQLIHDDSLTFKEDIQKAQVSGQGDSLHEHIANLAGSPAIKKGILQTVKVVDELVKVMGRHKPENIVIEMARENQTTQKGQKNSRERMKRIEEGIKELGSQILKEHPVENTQLQNEKLYLYYLQNGRDMYVDQELDINRLSDYDVDHIVPQSFLKDDSIDNKVLTRSDKARGKSDNVPSEEVVKKMKNYWRQLLNAKLITQRKFDNLTKAERGGLSELDKAGFIKRQLVETRQITKHVAQILDSRMNTKYDENDKLIREVKVITLKSKLVSDFRKDFQFYKVREINNYHHAHDAYLNAVVGTALIKKYPKLESEFVYGDYKVYDVRKMIAKSEQEIGKATAKYFFYSNIMNFFKTEITLANGEIRKRPLIETNGETGEIVWDKGRDFATVRKVLSMPQVNIVKKTEVQTGGFSKESILPKRNSDKLIARKKDWDPKKYGGFDSPTVAYSVLVVAKVEKGKSKKLKSVKELLGITIMERSSFEKNPIDFLEAKGYKEVKKDLIIKLPKYSLFELENGRKRMLASAGELQKGNELALPSKYVNFLYLASHYEKLKGSPEDNEQKQLFVEQHKHYLDEIIEQISEFSKRVILADANLDKVLSAYNKHRDKPIREQAENIIHLFTLTNLGAPAAFKYFDTTIDRKRYTSTKEVLDATLIHQSITGLYETRIDLSQLGGDGGPAPEAAAKGGGGGTLNIEDEYRLHETSKGPDVPLGSTWLSDFPQAWAETGGMGLAVRQAPLIIPLKATSTPVSIKQYPMSQEARLGIKPHIQRLLDQGILVPCQSPWNTPLLPVKKPGTNDYRPVQDLREVNKRVEDIHPTVPNPYNLLSGLPPSHQWYTVLDLKDAFFCLRLHPTSQSLFAFEWRDPEMGISGQLTWTRLPQGFKNSPTLFNEALHRDLADFRIQHPDLILLQYVDDLLLAATSELDCQQGTRALLQTLGDLGYRASAKKAQICQKQVKYLGYLLKEGQRWLTEARKETVMGQPTPKTPRQLREFLGKAGFCRLFIPGFAEMAAPLYPLTKPGTLFEWGPDQQKAYQEIKQALLTAPALGLPDLTKPFELFVDEKQGYAKGVLTQKLGPWRRPVAYLSKKLDPVAAGWPPCLRMVAAIAVLTKDAGKLTMGQPLVILAPHAVEALVKQPPDRWLSNARMTHYQALLLDTDRVQFGPIVALNPATLLPLPEEGLQHDCLDILAEAHGTRPDLTDQPLPDADHTWYTDGSSFLQEGQRKAGAAVTTETEVVWAKALPAGTSAQRAELIALTQALKMAEGKKLNVYTDSRYAFATAHIHGEIYRRRGWLTSEGKEIKNKDEILALLKALFLPKRLSIIHCPGHQKGNRAEARGNRMADQAAREVATRETPETSTLLAGKRTADGSEFEKRTADGSEFESPKKKAKVE

SEQ ID NO: 7559 - protein, 2096 aa, synthetic construct
MPAAKRVKLDGGDKKYSIGLDIGTNSVGWAVITDEYKVPSKKFKVLGNTDRHSIKKNLIGALLFDSGETAEATRLKRTARRRYTRRKNRICYLQEIFSNEMAKVDDSFFHRLEESFLVEEDKKHERHPIFGNIVDEVAYHEKYPTIYHLRKKLVDSTDKADLRLIYLALAHMIKFRGHFLIEGDLNPDNSDVDKLFIQLVQTYNQLFEENPINASGVDAKAILSARLSKSRRLENLIAQLPGEKKNGLFGNLIALSLGLTPNFKSNFDLAEDAKLQLSKDTYDDDLDNLLAQIGDQYADLFLAAKNLSDAILLSDILRVNTEITKAPLSASMIKRYDEHHQDLTLLKALVRQQLPEKYKEIFFDQSKNGYAGYIDGGASQEEFYKFIKPILEKMDGTEELLVKLNREDLLRKQRTFDNGSIPHQIHLGELHAILRRQEDFYPFLKDNREKIEKILTFRIPYYVGPLARGNSRFAWMTRKSEETITPWNFEEVVDKGASAQSFIERMTNFDKNLPNEKVLPKHSLLYEYFTVYNELTKVKYVTEGMRKPAFLSGEQKKAIVDLLFKTNRKVTVKQLKEDYFKKIECFDSVEISGVEDRFNASLGTYHDLLKIIKDKDFLDNEENEDILEDIVLTLTLFEDREMIEERLKTYAHLFDDKVMKQLKRRRYTGWGRLSRKLINGIRDKQSGKTILDFLKSDGFANRNFMQLIHDDSLTFKEDIQKAQVSGQGDSLHEHIANLAGSPAIKKGILQTVKVVDELVKVMGRHKPENIVIEMARENQTTQKGQKNSRERMKRIEEGIKELGSQILKEHPVENTQLQNEKLYLYYLQNGRDMYVDQELDINRLSDYDVDHIVPQSFLKDDSIDNKVLTRSDKARGKSDNVPSEEVVKKMKNYWRQLLNAKLITQRKFDNLTKAERGGLSELDKAGFIKRQLVETRQITKHVAQILDSRMNTKYDENDKLIREVKVITLKSKLVSDFRKDFQFYKVREINNYHHAHDAYLNAVVGTALIKKYPKLESEFVYGDYKVYDVRKMIAKSEQEIGKATAKYFFYSNIMNFFKTEITLANGEIRKRPLIETNGETGEIVWDKGRDFATVRKVLSMPQVNIVKKTEVQTGGFSKESILPKRNSDKLIARKKDWDPKKYGGFDSPTVAYSVLVVAKVEKGKSKKLKSVKELLGITIMERSSFEKNPIDFLEAKGYKEVKKDLIIKLPKYSLFELENGRKRMLASAGELQKGNELALPSKYVNFLYLASHYEKLKGSPEDNEQKQLFVEQHKHYLDEIIEQISEFSKRVILADANLDKVLSAYNKHRDKPIREQAENIIHLFTLTNLGAPAAFKYFDTTIDRKRYTSTKEVLDATLIHQSITGLYETRIDLSQLGGDGGPAPEAAAKGGGGGTLNIEDEHRLHETSKEPDVSLGSTWLSDFPQAWAETGGMGLAVRQAPLIIPLKATSTPVSIKQYPMSQEARLGIKPHIQRLLDQGILVPCQSPWNTPLLPVKKPGTNDYRPVQDLREVNKRVEDIHPTVPNPYNLLSGLPPSHQWYTVLDLKDAFFCLRLHPTSQPLFAFEWRDPEMGISGQLTWTRLPQGFKNSPTLFDEALHRDLADFRIQHPDLILLQYVDDLLLAATSELDCQQGTRALLQTLGNLGYRASAKKAQICQKQVKYLGYLLKEGQRWLTEARKETVMGQPTPKTPRQLREFLGTAGFCRLWIPGFAEMAAPLYPLTKTGTLFNWGPDQQKAYQEIKQALLTAPALGLPDLTKPFELFVDEKQGYAKGVLTQKLGPWRRPVAYLSKKLDPVAAGWPPCLRMVAAIAVLTKDAGKLTMGQPLVILAPHAVEALVKQPPDRWLSNARMTHYQALLLDTDRVQFGPVVALNPATLLPLPEEGLQHNCLDILAEAHGTRPDLTDQPLPDADHTWYTDGSSLLQEGQRKAGAAVTTETEVIWAKALPAGTSAQRAELIALTQALKMAEGKKLNVYTDSRYAFATAHIHGEIYRRRGLLTSEGKEIKNKDEILALLKALFLPKRLSIIHCPGHQKGHSAEARGNRMADQAARKAAITETPDTSTLLAGKRTADGSEFEKRTADGSEFESPKKKAKVE

SEQ ID NO: 7560 - protein, 2096 aa, synthetic construct; identical to SEQ ID NO: 7559

SEQ ID NO: 7561 - protein, 2116 aa, synthetic construct
MPAAKRVKLDGGDKKYSIGLDIGTNSVGWAVITDEYKVPSKKFKVLGNTDRHSIKKNLIGALLFDSGETAEATRLKRTARRRYTRRKNRICYLQEIFSNEMAKVDDSFFHRLEESFLVEEDKKHERHPIFGNIVDEVAYHEKYPTIYHLRKKLVDSTDKADLRLIYLALAHMIKFRGHFLIEGDLNPDNSDVDKLFIQLVQTYNQLFEENPINASGVDAKAILSARLSKSRRLENLIAQLPGEKKNGLFGNLIALSLGLTPNFKSNFDLAEDAKLQLSKDTYDDDLDNLLAQIGDQYADLFLAAKNLSDAILLSDILRVNTEITKAPLSASMIKRYDEHHQDLTLLKALVRQQLPEKYKEIFFDQSKNGYAGYIDGGASQEEFYKFIKPILEKMDGTEELLVKLNREDLLRKQRTFDNGSIPHQIHLGELHAILRRQEDFYPFLKDNREKIEKILTFRIPYYVGPLARGNSRFAWMTRKSEETITPWNFEEVVDKGASAQSFIERMTNFDKNLPNEKVLPKHSLLYEYFTVYNELTKVKYVTEGMRKPAFLSGEQKKAIVDLLFKTNRKVTVKQLKEDYFKKIECFDSVEISGVEDRFNASLGTYHDLLKIIKDKDFLDNEENEDILEDIVLTLTLFEDREMIEERLKTYAHLFDDKVMKQLKRRRYTGWGRLSRKLINGIRDKQSGKTILDFLKSDGFANRNFMQLIHDDSLTFKEDIQKAQVSGQGDSLHEHIANLAGSPAIKKGILQTVKVVDELVKVMGRHKPENIVIEMARENQTTQKGQKNSRERMKRIEEGIKELGSQILKEHPVENTQLQNEKLYLYYLQNGRDMYVDQELDINRLSDYDVDHIVPQSFLKDDSIDNKVLTRSDKARGKSDNVPSEEVVKKMKNYWRQLLNAKLITQRKFDNLTKAERGGLSELDKAGFIKRQLVETRQITKHVAQILDSRMNTKYDENDKLIREVKVITLKSKLVSDFRKDFQFYKVREINNYHHAHDAYLNAVVGTALIKKYPKLESEFVYGDYKVYDVRKMIAKSEQEIGKATAKYFFYSNIMNFFKTEITLANGEIRKRPLIETNGETGEIVWDKGRDFATVRKVLSMPQVNIVKKTEVQTGGFSKESILPKRNSDKLIARKKDWDPKKYGGFDSPTVAYSVLVVAKVEKGKSKKLKSVKELLGITIMERSSFEKNPIDFLEAKGYKEVKKDLIIKLPKYSLFELENGRKRMLASAGELQKGNELALPSKYVNFLYLASHYEKLKGSPEDNEQKQLFVEQHKHYLDEIIEQISEFSKRVILADANLDKVLSAYNKHRDKPIREQAENIIHLFTLTNLGAPAAFKYFDTTIDRKRYTSTKEVLDATLIHQSITGLYETRIDLSQLGGDGGPAPEAAAKGGGGGVQEISDSRPMLHIYLNGRRFLGLLDTGADKTCIAGRDWPANWPIHQTESSLQGLGMACGVARSSQPLRWQHEDKSGIIHPFVIPTLPFTLWGRDIMKDIKVRLMTDSPDDSQDLMIGAIESNLFADQISWKSDQPVWLNQWPLKQEKLQALQQLVTEQLQLGHLEESNSPWNTPVFVIKKKSGKWRLLQDLRAVNATMHDMGALQPGLPSPVAVPKGWEIIIIDLQDCFFNIKLHPEDCKRFAFSVPSPNFKRPYQRFQWKVLPQGMKNSPTLCQKFVDKAILTVRDKYQDSYIVHYMDDILLAHPSRSIVDEILTSMIQALNKHGLVVSTEKIQKYDNLKYLGTHIQGDSVSYQKLQIRTDKLRTLNDFQKLLGNINWIRPFLKLTTGELKPLFEILNGDSNPISTRKLTPEACKALQLMNERLSTARVKRLDLSQPWSLCILKTEYTPTACLWQDGVVEWIHLPHISPKVITPYDIFCTQLIIKGRHRSKELFSKDPDYIVVPYTKVQFDLLLQEKEDWPISLLGFLGEVHFHLPKDPLLTFTLQTAIIFPHMTSTTPLEKGIVIFTDGSANGRSVTYIQGREPIIKENTQNTAQQAEIVAVITAFEEVSQPFNLYTDSKYVTGLFPEIETATLSPRTKIYTELKHLQRLIHKRQEKFYIGHIRGHTGLPGPLAQGNAYADSLTRILTAAGKRTADGSEFEKRTADGSEFESPKKKAKVE

SEQ ID NO: 7562 - protein, 2090 aa, synthetic construct
MPAAKRVKLDGGDKKYSIGLDIGTNSVGWAVITDEYKVPSKKFKVLGNTDRHSIKKNLIGALLFDSGETAEATRLKRTARRRYTRRKNRICYLQEIFSNEMAKVDDSFFHRLEESFLVEEDKKHERHPIFGNIVDEVAYHEKYPTIYHLRKKLVDSTDKADLRLIYLALAHMIKFRGHFLIEGDLNPDNSDVDKLFIQLVQTYNQLFEENPINASGVDAKAILSARLSKSRRLENLIAQLPGEKKNGLFGNLIALSLGLTPNFKSNFDLAEDAKLQLSKDTYDDDLDNLLAQIGDQYADLFLAAKNLSDAILLSDILRVNTEITKAPLSASMIKRYDEHHQDLTLLKALVRQQLPEKYKEIFFDQSKNGYAGYIDGGASQEEFYKFIKPILEKMDGTEELLVKLNREDLLRKQRTFDNGSIPHQIHLGELHAILRRQEDFYPFLKDNREKIEKILTFRIPYYVGPLARGNSRFAWMTRKSEETITPWNFEEVVDKGASAQSFIERMTNFDKNLPNEKVLPKHSLLYEYFTVYNELTKVKYVTEGMRKPAFLSGEQKKAIVDLLFKTNRKVTVKQLKEDYFKKIECFDSVEISGVEDRFNASLGTYHDLLKIIKDKDFLDNEENEDILEDIVLTLTLFEDREMIEERLKTYAHLFDDKVMKQLKRRRYTGWGRLSRKLINGIRDKQSGKTILDFLKSDGFANRNFMQLIHDDSLTFKEDIQKAQVSGQGDSLHEHIANLAGSPAIKKGILQTVKVVDELVKVMGRHKPENIVIEMARENQTTQKGQKNSRERMKRIEEGIKELGSQILKEHPVENTQLQNEKLYLYYLQNGRDMYVDQELDINRLSDYDVDHIVPQSFLKDDSIDNKVLTRSDKARGKSDNVPSEEVVKKMKNYWRQLLNAKLITQRKFDNLTKAERGGLSELDKAGFIKRQLVETRQITKHVAQILDSRMNTKYDENDKLIREVKVITLKSKLVSDFRKDFQFYKVREINNYHHAHDAYLNAVVGTALIKKYPKLESEFVYGDYKVYDVRKMIAKSEQEIGKATAKYFFYSNIMNFFKTEITLANGEIRKRPLIETNGETGEIVWDKGRDFATVRKVLSMPQVNIVKKTEVQTGGFSKESILPKRNSDKLIARKKDWDPKKYGGFDSPTVAYSVLVVAKVEKGKSKKLKSVKELLGITIMERSSFEKNPIDFLEAKGYKEVKKDLIIKLPKYSLFELENGRKRMLASAGELQKGNELALPSKYVNFLYLASHYEKLKGSPEDNEQKQLFVEQHKHYLDEIIEQISEFSKRVILADANLDKVLSAYNKHRDKPIREQAENIIHLFTLTNLGAPAAFKYFDTTIDRKRYTSTKEVLDATLIHQSITGLYETRIDLSQLGGDGGPAPEAAAKGGGGGTLQLDDEYRLYSPLVKPDQNIQFWLEQFPQAWAETAGMGLAKQVPPQVIQLKASATPVSVRQYPLSKEAQEGIRPHVQRLIQQGILVPVQSPWNTPLLPVRKPGTNDYRPVQDLREVNKRVQDIHPTVPNPYNLLCALPPQRSWYTVLDLKDAFFCLRLHPTSQPLFAFEWRDPGTGRTGQLTWTRLPQGFKNSPTIFDEALHRDLANFRIQHPQVTLLQYVDDLLLAGATKQDCLEGTKALLLELSDLGYRASAKKAQICRREVTYLGYSLRDGQRWLTEARKKTVVQIPAPTTAKQVREFLGTAGFCRLWIPGFATLAAPLYPLTKEKGEFSWAPEHQKAFDAIKKALLSAPALALPDVTKPFTLYVDERKGVARGVLTQTLGPWRRPVAYLSKKLDPVASGWPVCLKAIAAVAILVKDADKLTLGQNITVIAPHALENIVRQPPDRWMTNARMTHYQSLLLTERVTFAPPAALNPATLLPEETDEPVTHDCHQLLIEETGVRKDLTDIPLTGEVLTWFTDGSSYVVEGKRMAGAAVVDGTRTIWASSLPEGTSAQKAELMALTQALRLAEGKSINIYTDSRYAFATAHVHGAIYKQRGLLTSAGREIKNKEEILSLLEALHLPKRLAIIHCPGHQKAKDPISRGNQMADRVAKQAAQGVNLLAGKRTADGSEFEKRTADGSEFESPKKKAKVE

SEQ ID NO: 7563 - protein, 2176 aa, synthetic construct
MPAAKRVKLDGGDKKYSIGLDIGTNSVGWAVITDEYKVPSKKFKVLGNTDRHSIKKNLIGALLFDSGETAEATRLKRTARRRYTRRKNRICYLQEIFSNEMAKVDDSFFHRLEESFLVEEDKKHERHPIFGNIVDEVAYHEKYPTIYHLRKKLVDSTDKADLRLIYLALAHMIKFRGHFLIEGDLNPDNSDVDKLFIQLVQTYNQLFEENPINASGVDAKAILSARLSKSRRLENLIAQLPGEKKNGLFGNLIALSLGLTPNFKSNFDLAEDAKLQLSKDTYDDDLDNLLAQIGDQYADLFLAAKNLSDAILLSDILRVNTEITKAPLSASMIKRYDEHHQDLTLLKALVRQQLPEKYKEIFFDQSKNGYAGYIDGGASQEEFYKFIKPILEKMDGTEELLVKLNREDLLRKQRTFDNGSIPHQIHLGELHAILRRQEDFYPFLKDNREKIEKILTFRIPYYVGPLARGNSRFAWMTRKSEETITPWNFEEVVDKGASAQSFIERMTNFDKNLPNEKVLPKHSLLYEYFTVYNELTKVKYVTEGMRKPAFLSGEQKKAIVDLLFKTNRKVTVKQLKEDYFKKIECFDSVEISGVEDRFNASLGTYHDLLKIIKDKDFLDNEENEDILEDIVLTLTLFEDREMIEERLKTYAHLFDDKVMKQLKRRRYTGWGRLSRKLINGIRDKQSGKTILDFLKSDGFANRNFMQLIHDDSLTFKEDIQKAQVSGQGDSLHEHIANLAGSPAIKKGILQTVKVVDELVKVMGRHKPENIVIEMARENQTTQKGQKNSRERMKRIEEGIKELGSQILKEHPVENTQLQNEKLYLYYLQNGRDMYVDQELDINRLSDYDVDHIVPQSFLKDDSIDNKVLTRSDKARGKSDNVPSEEVVKKMKNYWRQLLNAKLITQRKFDNLTKAERGGLSELDKAGFIKRQLVETRQITKHVAQILDSRMNTKYDENDKLIREVKVITLKSKLVSDFRKDFQFYKVREINNYHHAHDAYLNAVVGTALIKKYPKLESEFVYGDYKVYDVRKMIAKSEQEIGKATAKYFFYSNIMNFFKTEITLANGEIRKRPLIETNGETGEIVWDKGRDFATVRKVLSMPQVNIVKKTEVQTGGFSKESILPKRNSDKLIARKKDWDPKKYGGFDSPTVAYSVLVVAKVEKGKSKKLKSVKELLGITIMERSSFEKNPIDFLEAKGYKEVKKDLIIKLPKYSLFELENGRKRMLASAGELQKGNELALPSKYVNFLYLASHYEKLKGSPEDNEQKQLFVEQHKHYLDEIIEQISEFSKRVILADANLDKVLSAYNKHRDKPIREQAENIIHLFTLTNLGAPAAFKYFDTTIDRKRYTSTKEVLDATLIHQSITGLYETRIDLSQLGGDGGPAPEAAAKGGGGGMDPLQLLQPLEAEIKGTKLKAHWNSGATITCVPEAFLEDERPIQTMLIKTIHGEKQQDVYYLTFKVQGRKVEAEVLASPYDYILLNPSDVPWLMKKPLQLTVLVPLHEYQERLLQQTALPKEQKELLQKLFLKYDALWQHWENQVGHRRIKPHNIATGTLAPRPQKQYPINPKAKPSIQIVIDDLLKQGVLIQQNSTMNTPVYPVPKPDGKWRMVLDYREVNKTIPLIAAQNQHSAGILSSIYRGKYKTTLDLTNGFWAHPITPESYWLTAFTWQGKQYCWTRLPQGFLNSPALFTADVVDLLKEIPNVQAYVDDIYISHDDPQEHLEQLEKIFSILLNAGYVVSLKKSEIAQREVEFLGFNITKEGRGLTDTFKQKLLNITPPKDLKQLQSILGLLNFARNFIPNYSELVKPLYTIVANANGKFISWTEDNSNQLQHIISVLNQADNLEERNPETRLIIKVNSSPSAGYIRYYNEGSKRPIMYVNYIFSKAEAKFTQTEKLLTTMHKGLIKAMDLAMGQEILVYSPIVSMTKIQRTPLPERKALPVRWITWMTYLEDPRIQFHYDKSLPELQQIPNVTEDVIAKTKHPSEFAMVFYTDGSAIKHPDVNKSHSAGMGIAQVQFIPEYKIVHQWSIPLGDHTAQLAEIAAVEFACKKALKISGPVLIVTDSFYVAESANKELPYWKSNGFLNNKKKPLRHVSKWKSIAECLQLKPDIIIMHEKGHQQPMTTLHTEGNNLADKLATQGSYVVHAGKRTADGSEFEKRTADGSEFESPKKKAKVE

SEQ ID NO: 7564 - protein, 2176 aa, synthetic construct
MPAAKRVKLDGGDKKYSIGLDIGTNSVGWAVITDEYKVPSKKFKVLGNTDRHSIKKNLIGALLFDSGETAEATRLKRTARRRYTRRKNRICYLQEIFSNEMAKVDDSFFHRLEESFLVEEDKKHERHPIFGNIVDEVAYHEKYPTIYHLRKKLVDSTDKADLRLIYLALAHMIKFRGHFLIEGDLNPDNSDVDKLFIQLVQTYNQLFEENPINASGVDAKAILSARLSKSRRLENLIAQLPGEKKNGLFGNLIALSLGLTPNFKSNFDLAEDAKLQLSKDTYDDDLDNLLAQIGDQYADLFLAAKNLSDAILLSDILRVNTEITKAPLSASMIKRYDEHHQDLTLLKALVRQQLPEKYKEIFFDQSKNGYAGYIDGGASQEEFYKFIKPILEKMDGTEELLVKLNREDLLRKQRTFDNGSIPHQIHLGELHAILRRQEDFYPFLKDNREKIEKILTFRIPYYVGPLARGNSRFAWMTRKSEETITPWNFEEVVDKGASAQSFIERMTNFDKNLPNEKVLPKHSLLYEYFTVYNELTKVKYVTEGMRKPAFLSGEQKKAIVDLLFKTNRKVTVKQLKEDYFKKIECFDSVEISGVEDRFNASLGTYHDLLKIIKDKDFLDNEENEDILEDIVLTLTLFEDREMIEERLKTYAHLFDDKVMKQLKRRRYTGWGRLSRKLINGIRDKQSGKTILDFLKSDGFANRNFMQLIHDDSLTFKEDIQKAQVSGQGDSLHEHIANLAGSPAIKKGILQTVKVVDELVKVMGRHKPENIVIEMARENQTTQKGQKNSRERMKRIEEGIKELGSQILKEHPVENTQLQNEKLYLYYLQNGRDMYVDQELDINRLSDYDVDHIVPQSFLKDDSIDNKVLTRSDKARGKSDNVPSEEVVKKMKNYWRQLLNAKLITQRKFDNLTKAERGGLSELDKAGFIKRQLVETRQITKHVAQILDSRMNTKYDENDKLIREVKVITLKSKLVSDFRKDFQFYKVREINNYHHAHDAYLNAVVGTALIKKYPKLESEFVYGDYKVYDVRKMIAKSEQEIGKATAKYFFYSNIMNFFKTEITLANGEIRKRPLIETNGETGEIVWDKGRDFATVRKVLSMPQVNIVKKTEVQTGGFSKESILPKRNSDKLIARKKDWDPKKYGGFDSPTVAYSVLVVAKVEKGKSKKLKSVKELLGITIMERSSFEKNPIDFLEAKGYKEVKKDLIIKLPKYSLFELENGRKRMLASAGELQKGNELALPSKYVNFLYLASHYEKLKGSPEDNEQKQLFVEQHKHYLDEIIEQISEFSKRVILADANLDKVLSAYNKHRDKPIREQAENIIHLFTLTNLGAPAAFKYFDTTIDRKRYTSTKEVLDATLIHQSITGLYETRIDLSQLGGDGGPAPEAAAKGGGGGMDPLQLLQPLEAEIKGTKLKAHWNSGATITCVPEAFLEDERPIQTMLIKTIHGEKQQDVYYLTFKVQGRKVEAEVLASPYDYILLNPSDVPWLMKKPLQLTVLVPLHEYQERLLQQTALPKEQKELLQKLFLKYDALWQHWENQVGHRRIKPHNIATGTLAPRPQKQYPINPKAKPSIQIVIDDLLKQGVLIQQNSTMNTPVYPVPKPDGKWRMVLDYREVNKTIPLIAAQNQHSAGILSSIYRGKYKTTLDLTNGFWAHPITPESYWLTAFTWQGKQYCWTRLPQGFLNSPALFNADVVDLLKEIPNVQAYVDDIYISHDDPQEHLEQLEKIFSILLNAGYVVSLKKSEIAQREVEFLGFNITKEGRGLTDTFKQKLLNITPPKDLKQLQSILGLLNFARNFIPNYSELVKPLYTIVAPANGKFISWTEDNSNQLQHIISVLNQADNLEERNPETRLIIKVNSSPSAGYIRYYNEGSKRPIMYVNYIFSKAEAKFTQTEKLLTTMHKGLIKAMDLAMGQEILVYSPIVSMTKIQRTPLPERKALPVRWITWMTYLEDPRIQFHYDKSLPELQQIPNVTEDVIAKTKHPSEFAMVFYTDGSAIKHPDVNKSHSAGMGIAQVQFIPEYKIVHQWSIPLGDHTAQLAEIAAVEFACKKALKISGPVLIVTDSFYVAESANKELPYWKSNGFLNNKKKPLRHVSKWKSIAECLQLKPDIIIMHEKGHQQPMTTLHTEGNNLADKLATQGSYVVHAGKRTADGSEFEKRTADGSEFESPKKKAKVE

SEQ ID NO: 7565 - protein, 2087 aa, synthetic construct
MPAAKRVKLDGGDKKYSIGLDIGTNSVGWAVITDEYKVPSKKFKVLGNTDRHSIKKNLIGALLFDSGETAEATRLKRTARRRYTRRKNRICYLQEIFSNEMAKVDDSFFHRLEESFLVEEDKKHERHPIFGNIVDEVAYHEKYPTIYHLRKKLVDSTDKADLRLIYLALAHMIKFRGHFLIEGDLNPDNSDVDKLFIQLVQTYNQLFEENPINASGVDAKAILSARLSKSRRLENLIAQLPGEKKNGLFGNLIALSLGLTPNFKSNFDLAEDAKLQLSKDTYDDDLDNLLAQIGDQYADLFLAAKNLSDAILLSDILRVNTEITKAPLSASMIKRYDEHHQDLTLLKALVRQQLPEKYKEIFFDQSKNGYAGYIDGGASQEEFYKFIKPILEKMDGTEELLVKLNREDLLRKQRTFDNGSIPHQIHLGELHAILRRQEDFYPFLKDNREKIEKILTFRIPYYVGPLARGNSRFAWMTRKSEETITPWNFEEVVDKGASAQSFIERMTNFDKNLPNEKVLPKHSLLYEYFTVYNELTKVKYVTEGMRKPAFLSGEQKKAIVDLLFKTNRKVTVKQLKEDYFKKIECFDSVEISGVEDRFNASLGTYHDLLKIIKDKDFLDNEENEDILEDIVLTLTLFEDREMIEERLKTYAHLFDDKVMKQLKRRRYTGWGRLSRKLINGIRDKQSGKTILDFLKSDGFANRNFMQLIHDDSLTFKEDIQKAQVSGQGDSLHEHIANLAGSPAIKKGILQTVKVVDELVKVMGRHKPENIVIEMARENQTTQKGQKNSRERMKRIEEGIKELGSQILKEHPVENTQLQNEKLYLYYLQNGRDMYVDQELDINRLSDYDVDHIVPQSFLKDDSIDNKVLTRSDKARGKSDNVPSEEVVKKMKNYWRQLLNAKLITQRKFDNLTKAERGGLSELDKAGFIKRQLVETRQITKHVAQILDSRMNTKYDENDKLIREVKVITLKSKLVSDFRKDFQFYKVREINNYHHAHDAYLNAVVGTALIKKYPKLESEFVYGDYKVYDVRKMIAKSEQEIGKATAKYFFYSNIMNFFKTEITLANGEIRKRPLIETNGETGEIVWDKGRDFATVRKVLSMPQVNIVKKTEVQTGGFSKESILPKRNSDKLIARKKDWDPKKYGGFDSPTVAYSVLVVAKVEKGKSKKLKSVKELLGITIMERSSFEKNPIDFLEAKGYKEVKKDLIIKLPKYSLFELENGRKRMLASAGELQKGNELALPSKYVNFLYLASHYEKLKGSPEDNEQKQLFVEQHKHYLDEIIEQISEFSKRVILADANLDKVLSAYNKHRDKPIREQAENIIHLFTLTNLGAPAAFKYFDTTIDRKRYTSTKEVLDATLIHQSITGLYETRIDLSQLGGDGGPAPEAAAKGGGGGIPWLMKKPLQLTTLVPLQEYEERLLKQTMLTGSYKEKLQSLFLKYDALWQHWENQVGHRRIKPHHIATGTVNPRPQKQYPINPKAKASIQTVINDLLKQGVLIQQNSIMNTPVYPVPKPDGKWRMVLDYREVNKTIPLIAAQNQHSAGILSSIFRGKYKTTLDLSNGFWAHSITPESYWLTAFTWLGQQYCWTRLPQGFLNSPALFTADVVDLLKEVPNVQVYVDDIYISHDDPREHLEQLEKVFSLLLNAGYVVSLKKSEIAQHEVEFLGFNITKEGRGLTETFKQKLLNITPPRDLKQLQSILGLLNFARNFIPNFSELVKPLYNIIATANGKYITWTTDNSQQLQNIISMLNSAENLEERNPEVRLIMKVNTSPSAGYIRFYNEFAKRPIMYLNYVYTKAEVKFTNTEKLLTTIHKGLIKALDLGMGQEILVYSPIVSMTKIQKTPLPERKALPIRWITWMSYLEDPRIQFHYDKTLPELQQVPTVTDDIIAKIKHPSEFSMVFYTDGSAIKHPNVNKSHNAGMGIAQVQFKPEFTVINTWSIPLGDHTAQLAEVAAVEFACKKALKIDGPVLIVTDSFYVAESVNKELPYWQSNGFFNNKKKPLKHVSKWKSIADCIQLKPDIIIIHEKGHQPTASTFHTEGNNLADKLATQGSYVVNAGKRTADGSEFEKRTADGSEFESPKKKAKVE

SEQ ID NO: 7566 - protein, 2096 aa, synthetic construct
MPAAKRVKLDGGDKKYSIGLDIGTNSVGWAVITDEYKVPSKKFKVLGNTDRHSIKKNLIGALLFDSGETAEATRLKRTARRRYTRRKNRICYLQEIFSNEMAKVDDSFFHRLEESFLVEEDKKHERHPIFGNIVDEVAYHEKYPTIYHLRKKLVDSTDKADLRLIYLALAHMIKFRGHFLIEGDLNPDNSDVDKLFIQLVQTYNQLFEENPINASGVDAKAILSARLSKSRRLENLIAQLPGEKKNGLFGNLIALSLGLTPNFKSNFDLAEDAKLQLSKDTYDDDLDNLLAQIGDQYADLFLAAKNLSDAILLSDILRVNTEITKAPLSASMIKRYDEHHQDLTLLKALVRQQLPEKYKEIFFDQSKNGYAGYIDGGASQEEFYKFIKPILEKMDGTEELLVKLNREDLLRKQRTFDNGSIPHQIHLGELHAILRRQEDFYPFLKDNREKIEKILTFRIPYYVGPLARGNSRFAWMTRKSEETITPWNFEEVVDKGASAQSFIERMTNFDKNLPNEKVLPKHSLLYEYFTVYNELTKVKYVTEGMRKPAFLSGEQKKAIVDLLFKTNRKVTVKQLKEDYFKKIECFDSVEISGVEDRFNASLGTYHDLLKIIKDKDFLDNEENEDILEDIVLTLTLFEDREMIEERLKTYAHLFDDKVMKQLKRRRYTGWGRLSRKLINGIRDKQSGKTILDFLKSDGFANRNFMQLIHDDSLTFKEDIQKAQVSGQGDSLHEHIANLAGSPAIKKGILQTVKVVDELVKVMGRHKPENIVIEMARENQTTQKGQKNSRERMKRIEEGIKELGSQILKEHPVENTQLQNEKLYLYYLQNGRDMYVDQELDINRLSDYDVDHIVPQSFLKDDSIDNKVLTRSDKARGKSDNVPSEEVVKKMKNYWRQLLNAKLITQRKFDNLTKAERGGLSELDKAGFIKRQLVETRQITKHVAQILDSRMNTKYDENDKLIREVKVITLKSKLVSDFRKDFQFYKVREINNYHHAHDAYLNAVVGTALIKKYPKLESEFVYGDYKVYDVRKMIAKSEQEIGKATAKYFFYSNIMNFFKTEITLANGEIRKRPLIETNGETGEIVWDKGRDFATVRKVLSMPQVNIVKKTEVQTGGFSKESILPKRNSDKLIARKKDWDPKKYGGFDSPTVAYSVLVVAKVEKGKSKKLKSVKELLGITIMERSSFEKNPIDFLEAKGYKEVKKDLIIKLPKYSLFELENGRKRMLASAGELQKGNELALPSKYVNFLYLASHYEKLKGSPEDNEQKQLFVEQHKHYLDEIIEQISEFSKRVILADANLDKVLSAYNKHRDKPIREQAENIIHLFTLTNLGAPAAFKYFDTTIDRKRYTSTKEVLDATLIHQSITGLYETRIDLSQLGGDGGPAPEAAAKGGGGGTLNIEDEYRLHETSKEPDVPLGSTWLSDFPQAWAETGGMGLAVRQAPLIIPLKATSTPVSIKQYPMSQEARLGIKPHIQRLLDQGILVPCQSPWNTPLLPVKKPGTNDYRPVQDLREVNKRVEDIHPTVPNPYNLLSGLPPSHQWYTVLDLKDAFFCLRLHPTSQPLFAFEWRDPEMGISGQLTWTRLPQGFKNSPTLFDEALHRDLADFRIQHPDLILLQYVDDLLLAATSEQDCQRGTRALLQTLGNLGYRASAKKAQICQKQVKYLGYLLKEGQRWLTEARKETVMGQPTPKTPRQLREFLGTAGFCRLWIPGFAEMAAPLYPLTKTGTLFNWGPDQQKAYQEIKQALLTAPALGLPDLTKPFELFVDEKQGYAKGVLTQKLGPWRRPVAYLSKKLDPVAAGWPPCLRMVAAIAVLTKDAGKLTMGQPLVILAPHAVEALVKQPPDRWLSNARMTHYQAMLLDTDRVQFGPVVALNPATLLPLPEKEAPHDCLEILAETHGTRPDLTDQPIPDADYTWYTDGSSFLQEGQRRAGAAVTTETEVIWARALPAGTSAQRAELIALTQALKMAEGKKLNVYTDSRYAFATAHVHGEIYRRRGLLTSEGREIKNKNEILALLKALFLPKRLSIIHCPGHQKGNSAEARGNRMADQAAREAAMKAVLETSTLLAGKRTADGSEFEKRTADGSEFESPKKKAKVE

SEQ ID NO: 7567 - protein, 2096 aa, synthetic construct
MPAAKRVKLDGGDKKYSIGLDIGTNSVGWAVITDEYKVPSKKFKVLGNTDRHSIKKNLIGALLFDSGETAEATRLKRTARRRYTRRKNRICYLQEIFSNEMAKVDDSFFHRLEESFLVEEDKKHERHPIFGNIVDEVAYHEKYPTIYHLRKKLVDSTDKADLRLIYLALAHMIKFRGHFLIEGDLNPDNSDVDKLFIQLVQTYNQLFEENPINASGVDAKAILSARLSKSRRLENLIAQLPGEKKNGLFGNLIALSLGLTPNFKSNFDLAEDAKLQLSKDTYDDDLDNLLAQIGDQYADLFLAAKNLSDAILLSDILRVNTEITKAPLSASMIKRYDEHHQDLTLLKALVRQQLPEKYKEIFFDQSKNGYAGYIDGGASQEEFYKFIKPILEKMDGTEELLVKLNREDLLRKQRTFDNGSIPHQIHLGELHAILRRQEDFYPFLKDNREKIEKILTFRIPYYVGPLARGNSRFAWMTRKSEETITPWNFEEVVDKGASAQSFIERMTNFDKNLPNEKVLPKHSLLYEYFTVYNELTKVKYVTEGMRKPAFLSGEQKKAIVDLLFKTNRKVTVKQLKEDYFKKIECFDSVEISGVEDRFNASLGTYHDLLKIIKDKDFLDNEENEDILEDIVLTLTLFEDREMIEERLKTYAHLFDDKVMKQLKRRRYTGWGRLSRKLINGIRDKQSGKTILDFLKSDGFANRNFMQLIHDDSLTFKEDIQKAQVSGQGDSLHEHIANLAGSPAIKKGILQTVKVVDELVKVMGRHKPENIVIEMARENQTTQKGQKNSRERMKRIEEGIKELGSQILKEHPVENTQLQNEKLYLYYLQNGRDMYVDQELDINRLSDYDVDHIVPQSFLKDDSIDNKVLTRSDKARGKSDNVPSEEVVKKMKNYWRQLLNAKLITQRKFDNLTKAERGGLSELDKAGFIKRQLVETRQITKHVAQILDSRMNTKYDENDKLIREVKVITLKSKLVSDFRKDFQFYKVREINNYHHAHDAYLNAVVGTALIKKYPKLESEFVYGDYKVYDVRKMIAKSEQEIGKATAKYFFYSNIMNFFKTEITLANGEIRKRPLIETNGETGEIVWDKGRDFATVRKVLSMPQVNIVKKTEVQTGGFSKESILPKRNSDKLIARKKDWDPKKYGGFDSPTVAYSVLVVAKVEKGKSKKLKSVKELLGITIMERSSFEKNPIDFLEAKGYKEVKKDLIIKLPKYSLFELENGRKRMLASAGELQKGNELALPSKYVNFLYLASHYEKLKGSPEDNEQKQLFVEQHKHYLDEIIEQISEFSKRVILADANLDKVLSAYNKHRDKPIREQAENIIHLFTLTNLGAPAAFKYFDTTIDRKRYTSTKEVLDATLIHQSITGLYETRIDLSQLGGDGGPAPEAAAKGGGGGTLNIEDEYRLHETSKEPDVPLGSTWLSDFPQAWAETGGMGLAVRQAPLIIPLKATSTPVSIKQYPMSQEARLGIKPHIQRLLDQGILVPCQSPWNTPLLPVKKPGTNDYRPVQDLREVNKRVEDIHPTVPNPYNLLSGLPPSHQWYTVLDLKDAFFCLRLHPTSQPLFAFEWRDPEMGISGQLTWTRLPQGFKNSPTLFNEALHRDLADFRIQHPDLILLQYVDDLLLAATSEQDCQRGTRALLQTLGNLGYRASAKKAQICQKQVKYLGYLLKEGQRWLTEARKETVMGQPTPKTPRQLREFLGTAGFCRLWIPGFAEMAAPLYPLTKPGTLFNWGPDQQKAYQEIKQALLTAPALGLPDLTKPFELFVDEKQGYAKGVLTQKLGPWRRPVAYLSKKLDPVAAGWPPCLRMVAAIAVLTKDAGKLTMGQPLVILAPHAVEALVKQPPDRWLSNARMTHYQAMLLDTDRVQFGPVVALNPATLLPLPEKEAPHDCLEILAETHGTRPDLTDQPIPDADYTWYTDGSSFLQEGQRRAGAAVTTETEVIWARALPAGTSAQRAELIALTQALKMAEGKKLNVYTDSRYAFATAHVHGEIYRRRGWLTSEGREIKNKNEILALLKALFLPKRLSIIHCPGHQKGNSAEARGNRMADQAAREAAMKAVLETSTLLAGKRTADGSEFEKRTADGSEFESPKKKAKVE

SEQ ID NO: 7568 - protein, 2096 aa, synthetic construct
MPAAKRVKLDGGDKKYSIGLDIGTNSVGWAVITDEYKVPSKKFKVLGNTDRHSIKKNLIGALLFDSGETAEATRLKRTARRRYTRRKNRICYLQEIFSNEMAKVDDSFFHRLEESFLVEEDKKHERHPIFGNIVDEVAYHEKYPTIYHLRKKLVDSTDKADLRLIYLALAHMIKFRGHFLIEGDLNPDNSDVDKLFIQLVQTYNQLFEENPINASGVDAKAILSARLSKSRRLENLIAQLPGEKKNGLFGNLIALSLGLTPNFKSNFDLAEDAKLQLSKDTYDDDLDNLLAQIGDQYADLFLAAKNLSDAILLSDILRVNTEITKAPLSASMIKRYDEHHQDLTLLKALVRQQLPEKYKEIFFDQSKNGYAGYIDGGASQEEFYKFIKPILEKMDGTEELLVKLNREDLLRKQRTFDNGSIPHQIHLGELHAILRRQEDFYPFLKDNREKIEKILTFRIPYYVGPLARGNSRFAWMTRKSEETITPWNFEEVVDKGASAQSFIERMTNFDKNLPNEKVLPKHSLLYEYFTVYNELTKVKYVTEGMRKPAFLSGEQKKAIVDLLFKTNRKVTVKQLKEDYFKKIECFDSVEISGVEDRFNASLGTYHDLLKIIKDKDFLDNEENEDILEDIVLTLTLFEDREMIEERLKTYAHLFDDKVMKQLKRRRYTGWGRLSRKLINGIRDKQSGKTILDFLKSDGFANRNFMQLIHDDSLTFKEDIQKAQVSGQGDSLHEHIANLAGSPAIKKGILQTVKVVDELVKVMGRHKPENIVIEMARENQTTQKGQKNSRERMKRIEEGIKELGSQILKEHPVENTQLQNEKLYLYYLQNGRDMYVDQELDINRLSDYDVDHIVPQSFLKDDSIDNKVLTRSDKARGKSDNVPSEEVVKKMKNYWRQLLNAKLITQRKFDNLTKAERGGLSELDKAGFIKRQLVETRQITKHVAQILDSRMNTKYDENDKLIREVKVITLKSKLVSDFRKDFQFYKVREINNYHHAHDAYLNAVVGTALIKKYPKLESEFVYGDYKVYDVRKMIAKSEQEIGKATAKYFFYSNIMNFFKTEITLANGEIRKRPLIETNGETGEIVWDKGRDFATVRKVLSMPQVNIVKKTEVQTGGFSKESILPKRNSDKLIARKKDWDPKKYGGFDSPTVAYSVLVVAKVEKGKSKKLKSVKELLGITIMERSSFEKNPIDFLEAKGYKEVKKDLIIKLPKYSLFELENGRKRMLASAGELQKGNELALPSKYVNFLYLASHYEKLKGSPEDNEQKQLFVEQHKHYLDEIIEQISEFSKRVILADANLDKVLSAYNKHRDKPIREQAENIIHLFTLTNLGAPAAFKYFDTTIDRKRYTSTKEVLDATLIHQSITGLYETRIDLSQLGGDGGPAPEAAAKGGGGGTLNIEDEYRLHETSKEPDVPLGSTWLSDFPQAWAETGGMGLAVRQAPLIIPLKATSTPVSIKQYPMSQEARLGIKPHIQRLLDQGILVPCQSPWNTPLLPVKKPGTNDYRPVQDLREVNKRVEDIHPTVPNPYNLLSGLPPSHQWYTVLDLKDAFFCLRLHPTSQPLFAFEWRDPEMGISGQLTWTRLPQGFKNSPTLFNEALHRDLADFRIQHPDLILLQYVDDLLLAATSEQDCQRGTRALLQTLGNLGYRASAKKAQICQKQVKYLGYLLKEGQRWLTEARKETVMGQPTPKTPRQLREFLGKAGFCRLFIPGFAEMAAPLYPLTKPGTLFNWGPDQQKAYQEIKQALLTAPALGLPDLTKPFELFVDEKQGYAKGVLTQKLGPWRRPVAYLSKKLDPVAAGWPPCLRMVAAIAVLTKDAGKLTMGQPLVILAPHAVEALVKQPPDRWLSNARMTHYQAMLLDTDRVQFGPVVALNPATLLPLPEKEAPHDCLEILAETHGTRPDLTDQPIPDADYTWYTDGSSFLQEGQRRAGAAVTTETEVIWARALPAGTSAQRAELIALTQALKMAEGKKLNVYTDSRYAFATAHVHGEIYRRRGWLTSEGREIKNKNEILALLKALFLPKRLSIIHCPGHQKGNSAEARGNRMADQAAREAAMKAVLETSTLLAGKRTADGSEFEKRTADGSEFESPKKKAKVE

SEQ ID NO: 7569 - protein, 2098 aa, synthetic construct
MPAAKRVKLDGGDKKYSIGLDIGTNSVGWAVITDEYKVPSKKFKVLGNTDRHSIKKNLIGALLFDSGETAEATRLKRTARRRYTRRKNRICYLQEIFSNEMAKVDDSFFHRLEESFLVEEDKKHERHPIFGNIVDEVAYHEKYPTIYHLRKKLVDSTDKADLRLIYLALAHMIKFRGHFLIEGDLNPDNSDVDKLFIQLVQTYNQLFEENPINASGVDAKAILSARLSKSRRLENLIAQLPGEKKNGLFGNLIALSLGLTPNFKSNFDLAEDAKLQLSKDTYDDDLDNLLAQIGDQYADLFLAAKNLSDAILLSDILRVNTEITKAPLSASMIKRYDEHHQDLTLLKALVRQQLPEKYKEIFFDQSKNGYAGYIDGGASQEEFYKFIKPILEKMDGTEELLVKLNREDLLRKQRTFDNGSIPHQIHLGELHAILRRQEDFYPFLKDNREKIEKILTFRIPYYVGPLARGNSRFAWMTRKSEETITPWNFEEVVDKGASAQSFIERMTNFDKNLPNEKVLPKHSLLYEYFTVYNELTKVKYVTEGMRKPAFLSGEQKKAIVDLLFKTNRKVTVKQLKEDYFKKIECFDSVEISGVEDRFNASLGTYHDLLKIIKDKDFLDNEENEDILEDIVLTLTLFEDREMIEERLKTYAHLFDDKVMKQLKRRRYTGWGRLSRKLINGIRDKQSGKTILDFLKSDGFANRNFMQLIHDDSLTFKEDIQKAQVSGQGDSLHEHIANLAGSPAIKKGILQTVKVVDELVKVMGRHKPENIVIEMARENQTTQKGQKNSRERMKRIEEGIKELGSQILKEHPVENTQLQNEKLYLYYLQNGRDMYVDQELDINRLSDYDVDHIVPQSFLKDDSIDNKVLTRSDKARGKSDNVPSEEVVKKMKNYWRQLLNAKLITQRKFDNLTKAERGGLSELDKAGFIKRQLVETRQITKHVAQILDSRMNTKYDENDKLIREVKVITLKSKLVSDFRKDFQFYKVREINNYHHAHDAYLNAVVGTALIKKYPKLESEFVYGDYKVYDVRKMIAKSEQEIGKATAKYFFYSNIMNFFKTEITLANGEIRKRPLIETNGETGEIVWDKGRDFATVRKVLSMPQVNIVKKTEVQTGGFSKESILPKRNSDKLIARKKDWDPKKYGGFDSPTVAYSVLVVAKVEKGKSKKLKSVKELLGITIMERSSFEKNPIDFLEAKGYKEVKKDLIIKLPKYSLFELENGRKRMLASAGELQKGNELALPSKYVNFLYLASHYEKLKGSPEDNEQKQLFVEQHKHYLDEIIEQISEFSKRVILADANLDKVLSAYNKHRDKPIREQAENIIHLFTLTNLGAPAAFKYFDTTIDRKRYTSTKEVLDATLIHQSITGLYETRIDLSQLGGDGGGSSEAAAKPAPGGTAPLEEEYRLFLEAPIQNVTLLEQWKREIPKVWAEINPPGLASTQAPIHVQLLSTALPVRVRQYPITLEAKRSLRETIRKFRAAGILRPVHSPWNTPLLPVRKSGTSEYRMVQDLREVNKRVETIHPTVPNPYTLLSLLPPDRIWYSVLDLKDAFFCIPLAPESQLIFAFEWADAEEGESGQLTWTRLPQGFKNSPTLFNEALNRDLQGFRLDHPSVSLLQYVDDLLIAADTQAACLSATRDLLMTLAELGYRVSGKKAQLCQEEVTYLGFKIHKGSRSLSNSRTQAILQIPVPKTKRQVREFLGTIGYCRLWIPGFAELAQPLYAATRPGNDPLVWGEKEEEAFQSLKLALTQPPALALPSLDKPFQLFVEETSGAAKGVLTQALGPWKRPVAYLSKRLDPVAAGWPRCLRAIAAAALLTREASKLTFGQDIEITSSHNLESLLRSPPDKWLTNARITQYQVLLLDPPRVRFKQTAALNPATLLPETDDTLPIHHCLDTLDSLTSTRPDLTDQPLAQAEATLFTDGSSYIRDGKRYAGAAVVTLDSVIWAEPLPIGTSAQKAELIALTKALEWSKDKSVNIYTDSRYAFATLHVHGMIYRERGWLTAGGKAIKNAPEILALLTAVWLPKRVAVMHCKGHQKDDAPTSTGNRRADEVAREVAIRPLSTQATISAGKRTADGSEFEKRTADGSEFESPKKKAKVE

SEQ ID NO: 7570 - protein, 2102 aa, synthetic construct
MPAAKRVKLDGGDKKYSIGLDIGTNSVGWAVITDEYKVPSKKFKVLGNTDRHSIKKNLIGALLFDSGETAEATRLKRTARRRYTRRKNRICYLQEIFSNEMAKVDDSFFHRLEESFLVEEDKKHERHPIFGNIVDEVAYHEKYPTIYHLRKKLVDSTDKADLRLIYLALAHMIKFRGHFLIEGDLNPDNSDVDKLFIQLVQTYNQLFEENPINASGVDAKAILSARLSKSRRLENLIAQLPGEKKNGLFGNLIALSLGLTPNFKSNFDLAEDAKLQLSKDTYDDDLDNLLAQIGDQYADLFLAAKNLSDAILLSDILRVNTEITKAPLSASMIKRYDEHHQDLTLLKALVRQQLPEKYKEIFFDQSKNGYAGYIDGGASQEEFYKFIKPILEKMDGTEELLVKLNREDLLRKQRTFDNGSIPHQIHLGELHAILRRQEDFYPFLKDNREKIEKILTFRIPYYVGPLARGNSRFAWMTRKSEETITPWNFEEVVDKGASAQSFIERMTNFDKNLPNEKVLPKHSLLYEYFTVYNELTKVKYVTEGMRKPAFLSGEQKKAIVDLLFKTNRKVTVKQLKEDYFKKIECFDSVEISGVEDRFNASLGTYHDLLKIIKDKDFLDNEENEDILEDIVLTLTLFEDREMIEERLKTYAHLFDDKVMKQLKRRRYTGWGRLSRKLINGIRDKQSGKTILDFLKSDGFANRNFMQLIHDDSLTFKEDIQKAQVSGQGDSLHEHIANLAGSPAIKKGILQTVKVVDELVKVMGRHKPENIVIEMARENQTTQKGQKNSRERMKRIEEGIKELGSQILKEHPVENTQLQNEKLYLYYLQNGRDMYVDQELDINRLSDYDVDHIVPQSFLKDDSIDNKVLTRSDKARGKSDNVPSEEVVKKMKNYWRQLLNAKLITQRKFDNLTKAERGGLSELDKAGFIKRQLVETRQITKHVAQILDSRMNTKYDENDKLIREVKVITLKSKLVSDFRKDFQFYKVREINNYHHAHDAYLNAVVGTALIKKYPKLESEFVYGDYKVYDVRKMIAKSEQEIGKATAKYFFYSNIMNFFKTEITLANGEIRKRPLIETNGETGEIVWDKGRDFATVRKVLSMPQVNIVKKTEVQTGGFSKESILPKRNSDKLIARKKDWDPKKYGGFDSPTVAYSVLVVAKVEKGKSKKLKSVKELLGITIMERSSFEKNPIDFLEAKGYKEVKKDLIIKLPKYSLFELENGRKRMLASAGELQKGNELALPSKYVNFLYLASHYEKLKGSPEDNEQKQLFVEQHKHYLDEIIEQISEFSKRVILADANLDKVLSAYNKHRDKPIREQAENIIHLFTLTNLGAPAAFKYFDTTIDRKRYTSTKEVLDATLIHQSITGLYETRIDLSQLGGDGGGSSEAAAKPAPGGTVSLQDEHRLFDIPVTTSLPDVWLQDFPQAWAETGGLGRAKCQAPIIIDLKPTAVPVSIKQYPMSLEAHMGIRQHIIKFLELGVLRPCRSPWNTPLLPVKKPGTQDYRPVQDLREINKRTVDIHPTVPNPYNLLSTLKPDYSWYTVLDLKDAFFCLPLAPQSQELFAFEWKDPERGISGQLTWTRLPQGFKNSPTLFNEALHRDLTDFRTQHPEVTLLQYVDDLLLAAPTKKACTQGTRHLLQELGEKGYRASAKKAQICQTKVTYLGYILSEGKRWLTPGRIETVARIPPPRNPREVREFLGTAGFCRLWIPGFAELAAPLYALTKPSTPFTWQTEHQLAFEALKKALLSAPALGLPDTSKPFTLFLDERQGIAKGVLTQKLGPWKRPVAYLSKKLDPVAAGWPPCLRIMAATAMLVKDSAKLTLGQPLTVITPHTLEAIVRQPPDRWITNARLTHYQALLLDTDRVQFGPPVTLNPATLLPVPENQPSPHDCRQVLAETHGTREDLKDQELPDADHTWYTDGSSYLDSGTRRAGAAVVDGHNTIWAQSLPPGTSAQKAELIALTKALELSKGKKANIYTDSRYAFATAHTHGSIYERRGWLTSEGKEIKNKAEIIALLKALFLPQEVAIIHCPGHQKGQDPVAVGNRQADRVARQAAMAEVLTLATEPDNTSHITAGKRTADGSEFEKRTADGSEFESPKKKAKVE

SEQ ID NO: 7571 - protein, 2173 aa, synthetic construct
MPAAKRVKLDGGDKKYSIGLDIGTNSVGWAVITDEYKVPSKKFKVLGNTDRHSIKKNLIGALLFDSGETAEATRLKRTARRRYTRRKNRICYLQEIFSNEMAKVDDSFFHRLEESFLVEEDKKHERHPIFGNIVDEVAYHEKYPTIYHLRKKLVDSTDKADLRLIYLALAHMIKFRGHFLIEGDLNPDNSDVDKLFIQLVQTYNQLFEENPINASGVDAKAILSARLSKSRRLENLIAQLPGEKKNGLFGNLIALSLGLTPNFKSNFDLAEDAKLQLSKDTYDDDLDNLLAQIGDQYADLFLAAKNLSDAILLSDILRVNTEITKAPLSASMIKRYDEHHQDLTLLKALVRQQLPEKYKEIFFDQSKNGYAGYIDGGASQEEFYKFIKPILEKMDGTEELLVKLNREDLLRKQRTFDNGSIPHQIHLGELHAILRRQEDFYPFLKDNREKIEKILTFRIPYYVGPLARGNSRFAWMTRKSEETITPWNFEEVVDKGASAQSFIERMTNFDKNLPNEKVLPKHSLLYEYFTVYNELTKVKYVTEGMRKPAFLSGEQKKAIVDLLFKTNRKVTVKQLKEDYFKKIECFDSVEISGVEDRFNASLGTYHDLLKIIKDKDFLDNEENEDILEDIVLTLTLFEDREMIEERLKTYAHLFDDKVMKQLKRRRYTGWGRLSRKLINGIRDKQSGKTILDFLKSDGFANRNFMQLIHDDSLTFKEDIQKAQVSGQGDSLHEHIANLAGSPAIKKGILQTVKVVDELVKVMGRHKPENIVIEMARENQTTQKGQKNSRERMKRIEEGIKELGSQILKEHPVENTQLQNEKLYLYYLQNGRDMYVDQELDINRLSDYDVDHIVPQSFLKDDSIDNKVLTRSDKARGKSDNVPSEEVVKKMKNYWRQLLNAKLITQRKFDNLTKAERGGLSELDKAGFIKRQLVETRQITKHVAQILDSRMNTKYDENDKLIREVKVITLKSKLVSDFRKDFQFYKVREINNYHHAHDAYLNAVVGTALIKKYPKLESEFVYGDYKVYDVRKMIAKSEQEIGKATAKYFFYSNIMNFFKTEITLANGEIRKRPLIETNGETGEIVWDKGRDFATVRKVLSMPQVNIVKKTEVQTGGFSKESILPKRNSDKLIARKKDWDPKKYGGFDSPTVAYSVLVVAKVEKGKSKKLKSVKELLGITIMERSSFEKNPIDFLEAKGYKEVKKDLIIKLPKYSLFELENGRKRMLASAGELQKGNELALPSKYVNFLYLASHYEKLKGSPEDNEQKQLFVEQHKHYLDEIIEQISEFSKRVILADANLDKVLSAYNKHRDKPIREQAENIIHLFTLTNLGAPAAFKYFDTTIDRKRYTSTKEVLDATLIHQSITGLYETRIDLSQLGGDGGGSSEAAAKPAPGGMDLLKPLTVERKGVKIKGYWNSQADITCVPKDLLQGEEPVRQQNVTTIHGTQEGDVYYVNLKIDGRRINTEVIGTTLDYAIITPGDVPWILKKPLELTIKLDLEEQQGTLLNNSILSKKGKEELKQLFEKYSALWQSWENQVGHRRIRPHKIATGTVKPTPQKQYHINPKAKPDIQIVINDLLKQGVLIQKESTMNTPVYPVPKPNGRWRMVLDYRAVNKVTPLIAVQNQHSYGILGSLFKGRYKTTIDLSNGFWAHPIVPEDYWITAFTWQGKQYCWTVLPQGFLNSPGLFNGDVVDLLQGIPNVEVYVDDVYISHDSEKEHLEYLDILFNRLKEAGYIISLKKSNIANSIVDFLGFQITNEGRGLTDTFKEKLENITAPTTLKQLQSILGLLNFARNFIPDFTELIAPLYALIPKSPKNYVPWQIEHSTTLETLITKLNGAEYLQGRKGDKTLIMKVNASYTTGYIRYYNEGEKKPISYVSIVFSKTELKFTELEKLLTTVHKGLLKALDLSMGQNIHVYSPIVSMQNIQKTPQTAKKALASRWLSWLSYLEDPRIRFFYDPQMPALKDLPAVDTGKDNKKHPSNFQHIFYTDGSAITSPTKEGHLNAGMGIVYFINKDGNLQKQQEWSISLGNHTAQFAEIAAFEFALKKCLPLGGNILVVTDSNYVAKAYNEELDVWASNGFVNNRKKPLKHISKWKSVADLKRLRPDVVVTHEPGHQKLDSSPHAYGNNLADQLATQASFKVHAGKRTADGSEFEKRTADGSEFESPKKKAKVE

SEQ ID NO: 7572 - protein, 2095 aa, synthetic construct
MPAAKRVKLDGGDKKYSIGLDIGTNSVGWAVITDEYKVPSKKFKVLGNTDRHSIKKNLIGALLFDSGETAEATRLKRTARRRYTRRKNRICYLQEIFSNEMAKVDDSFFHRLEESFLVEEDKKHERHPIFGNIVDEVAYHEKYPTIYHLRKKLVDSTDKADLRLIYLALAHMIKFRGHFLIEGDLNPDNSDVDKLFIQLVQTYNQLFEENPINASGVDAKAILSARLSKSRRLENLIAQLPGEKKNGLFGNLIALSLGLTPNFKSNFDLAEDAKLQLSKDTYDDDLDNLLAQIGDQYADLFLAAKNLSDAILLSDILRVNTEITKAPLSASMIKRYDEHHQDLTLLKALVRQQLPEKYKEIFFDQSKNGYAGYIDGGASQEEFYKFIKPILEKMDGTEELLVKLNREDLLRKQRTFDNGSIPHQIHLGELHAILRRQEDFYPFLKDNREKIEKILTFRIPYYVGPLARGNSRFAWMTRKSEETITPWNFEEVVDKGASAQSFIERMTNFDKNLPNEKVLPKHSLLYEYFTVYNELTKVKYVTEGMRKPAFLSGEQKKAIVDLLFKTNRKVTVKQLKEDYFKKIECFDSVEISGVEDRFNASLGTYHDLLKIIKDKDFLDNEENEDILEDIVLTLTLFEDREMIEERLKTYAHLFDDKVMKQLKRRRYTGWGRLSRKLINGIRDKQSGKTILDFLKSDGFANRNFMQLIHDDSLTFKEDIQKAQVSGQGDSLHEHIANLAGSPAIKKGILQTVKVVDELVKVMGRHKPENIVIEMARENQTTQKGQKNSRERMKRIEEGIKELGSQILKEHPVENTQLQNEKLYLYYLQNGRDMYVDQELDINRLSDYDVDHIVPQSFLKDDSIDNKVLTRSDKARGKSDNVPSEEVVKKMKNYWRQLLNAKLITQRKFDNLTKAERGGLSELDKAGFIKRQLVETRQITKHVAQILDSRMNTKYDENDKLIREVKVITLKSKLVSDFRKDFQFYKVREINNYHHAHDAYLNAVVGTALIKKYPKLESEFVYGDYKVYDVRKMIAKSEQEIGKATAKYFFYSNIMNFFKTEITLANGEIRKRPLIETNGETGEIVWDKGRDFATVRKVLSMPQVNIVKKTEVQTGGFSKESILPKRNSDKLIARKKDWDPKKYGGFDSPTVAYSVLVVAKVEKGKSKKLKSVKELLGITIMERSSFEKNPIDFLEAKGYKEVKKDLIIKLPKYSLFELENGRKRMLASAGELQKGNELALPSKYVNFLYLASHYEKLKGSPEDNEQKQLFVEQHKHYLDEIIEQISEFSKRVILADANLDKVLSAYNKHRDKPIREQAENIIHLFTLTNLGAPAAFKYFDTTIDRKRYTSTKEVLDATLIHQSITGLYETRIDLSQLGGDGGGSSEAAAKPAPGGTLQLEEEYRLFEPESTQKQEMDIWLKNFPQAWAETGGMGTAHCQAPVLIQLKATATPISIRQYPMPHEAYQGIKPHIRRMLDQGILKPCQSPWNTPLLPVKKPGTEDYRPVQDLREVNKRVEDIHPTVPNPYNLLSTLPPSHPWYTVLDLKDAFFCLRLHSESQLLFAFEWRDPEIGLSGQLTWTRLPQGFKNSPTLFNEALHSDLADFRVRYPALVLLQYVDDLLLAAATRTECLEGTKALLETLGNKGYRASAKKAQICLQEVTYLGYSLKDGQRWLTKARKEAILSIPVPKNSRQVREFLGTAGYCRLWIPGFAELAAPLYPLTRPGTLFQWGTEQQLAFEDIKKALLSSPALGLPDITKPFELFIDENSGFAKGVLVQKLGPWKRPVAYLSKKLDTVASGWPPCLRMVAAIAILVKDAGKLTLGQPLTILTSHPVEALVRQPPNKWLSNARMTHYQAMLLDAERVHFGPTVSLNPATLLPLPSGGNHHDCLQILAETHGTRPDLTDQPLPDADLTWYTDGSSFIRNGEREAGAAVTTESEVIWAAPLPPGTSAQRAELIALTQALKMAEGKKLTVYTDSRYAFATTHVHGEIYRRRGWLTSEGKEIKNKNEILALLEALFLPKRLSIIHCPGHQKGDSPQAKGNRLADDTAKKAATETHSSLTVLPAGKRTADGSEFEKRTADGSEFESPKKKAKVE

SEQ ID NO: 7573 - protein, 2087 aa, synthetic construct
MPAAKRVKLDGGDKKYSIGLDIGTNSVGWAVITDEYKVPSKKFKVLGNTDRHSIKKNLIGALLFDSGETAEATRLKRTARRRYTRRKNRICYLQEIFSNEMAKVDDSFFHRLEESFLVEEDKKHERHPIFGNIVDEVAYHEKYPTIYHLRKKLVDSTDKADLRLIYLALAHMIKFRGHFLIEGDLNPDNSDVDKLFIQLVQTYNQLFEENPINASGVDAKAILSARLSKSRRLENLIAQLPGEKKNGLFGNLIALSLGLTPNFKSNFDLAEDAKLQLSKDTYDDDLDNLLAQIGDQYADLFLAAKNLSDAILLSDILRVNTEITKAPLSASMIKRYDEHHQDLTLLKALVRQQLPEKYKEIFFDQSKNGYAGYIDGGASQEEFYKFIKPILEKMDGTEELLVKLNREDLLRKQRTFDNGSIPHQIHLGELHAILRRQEDFYPFLKDNREKIEKILTFRIPYYVGPLARGNSRFAWMTRKSEETITPWNFEEVVDKGASAQSFIERMTNFDKNLPNEKVLPKHSLLYEYFTVYNELTKVKYVTEGMRKPAFLSGEQKKAIVDLLFKTNRKVTVKQLKEDYFKKIECFDSVEISGVEDRFNASLGTYHDLLKIIKDKDFLDNEENEDILEDIVLTLTLFEDREMIEERLKTYAHLFDDKVMKQLKRRRYTGWGRLSRKLINGIRDKQSGKTILDFLKSDGFANRNFMQLIHDDSLTFKEDIQKAQVSGQGDSLHEHIANLAGSPAIKKGILQTVKVVDELVKVMGRHKPENIVIEMARENQTTQKGQKNSRERMKRIEEGIKELGSQILKEHPVENTQLQNEKLYLYYLQNGRDMYVDQELDINRLSDYDVDHIVPQSFLKDDSIDNKVLTRSDKARGKSDNVPSEEVVKKMKNYWRQLLNAKLITQRKFDNLTKAERGGLSELDKAGFIKRQLVETRQITKHVAQILDSRMNTKYDENDKLIREVKVITLKSKLVSDFRKDFQFYKVREINNYHHAHDAYLNAVVGTALIKKYPKLESEFVYGDYKVYDVRKMIAKSEQEIGKATAKYFFYSNIMNFFKTEITLANGEIRKRPLIETNGETGEIVWDKGRDFATVRKVLSMPQVNIVKKTEVQTGGFSKESILPKRNSDKLIARKKDWDPKKYGGFDSPTVAYSVLVVAKVEKGKSKKLKSVKELLGITIMERSSFEKNPIDFLEAKGYKEVKKDLIIKLPKYSLFELENGRKRMLASAGELQKGNELALPSKYVNFLYLASHYEKLKGSPEDNEQKQLFVEQHKHYLDEIIEQISEFSKRVILADANLDKVLSAYNKHRDKPIREQAENIIHLFTLTNLGAPAAFKYFDTTIDRKRYTSTKEVLDATLIHQSITGLYETRIDLSQLGGDGGGSSEAAAKPAPGGVPWLTQQPLQLTILVPLQEYQEKILSKTALPEDQKQQLKTLFVKYDNLWQHWENQVGHRKIRPHNIATGDYPPRPQKQYPINPKAKPSIQIVIDDLLKQGVLTPQNSTMNTPVYPVPKPDGRWRMVLDYREVNKTIPLTAAQNQHSAGILATIVRQKYKTTLDLANGFWAHPITPESYWLTAFTWQGKQYCWTRLPQGFLNSPALFNADVVDLLKEIPNVQVYVDDIYLSHDDPKEHVQQLEKVFQILLQAGYVVSLKKSEIGQKTVEFLGFNITKEGRGLTDTFKTKLLNITPPKDLKQLQSILGKLNFARNFIPNFAELVQPLYNLIAPAKGKYIEWSEENTKQLNMVIEALNTASNLEERLPEQRLVIKVNTSPSAGYVRYYNETGKKPIMYLNYVFSKAELKFSMLEKLLTTMHKALIKAMDLAMGQEILVYSPIVSMTKIQKTPLPERKALPIRWITWMTYLEDPRIQFHYDKTLPELKHIPDVYTSSQSPVKHPSQYEGVFYTDGSAIKSPDPTKSNNAGMGIVHATYKPEYQVLNQWSIPLGNHTAQMAEIAAVEFACKKALKIPGPVLVITDSFYVAESANKELPYWKSNGFVNNKKKPLKHISKWKSIAECLSMKPDITIQHEKGISLQIPVFILKGNALADKLATQGSYVVNAGKRTADGSEFEKRTADGSEFESPKKKAKVE

SEQ ID NO: 7574 - protein, 2127 aa, synthetic construct
MPAAKRVKLDGGDKKYSIGLDIGTNSVGWAVITDEYKVPSKKFKVLGNTDRHSIKKNLIGALLFDSGETAEATRLKRTARRRYTRRKNRICYLQEIFSNEMAKVDDSFFHRLEESFLVEEDKKHERHPIFGNIVDEVAYHEKYPTIYHLRKKLVDSTDKADLRLIYLALAHMIKFRGHFLIEGDLNPDNSDVDKLFIQLVQTYNQLFEENPINASGVDAKAILSARLSKSRRLENLIAQLPGEKKNGLFGNLIALSLGLTPNFKSNFDLAEDAKLQLSKDTYDDDLDNLLAQIGDQYADLFLAAKNLSDAILLSDILRVNTEITKAPLSASMIKRYDEHHQDLTLLKALVRQQLPEKYKEIFFDQSKNGYAGYIDGGASQEEFYKFIKPILEKMDGTEELLVKLNREDLLRKQRTFDNGSIPHQIHLGELHAILRRQEDFYPFLKDNREKIEKILTFRIPYYVGPLARGNSRFAWMTRKSEETITPWNFEEVVDKGASAQSFIERMTNFDKNLPNEKVLPKHSLLYEYFTVYNELTKVKYVTEGMRKPAFLSGEQKKAIVDLLFKTNRKVTVKQLKEDYFKKIECFDSVEISGVEDRFNASLGTYHDLLKIIKDKDFLDNEENEDILEDIVLTLTLFEDREMIEERLKTYAHLFDDKVMKQLKRRRYTGWGRLSRKLINGIRDKQSGKTILDFLKSDGFANRNFMQLIHDDSLTFKEDIQKAQVSGQGDSLHEHIANLAGSPAIKKGILQTVKVVDELVKVMGRHKPENIVIEMARENQTTQKGQKNSRERMKRIEEGIKELGSQILKEHPVENTQLQNEKLYLYYLQNGRDMYVDQELDINRLSDYDVDHIVPQSFLKDDSIDNKVLTRSDKARGKSDNVPSEEVVKKMKNYWRQLLNAKLITQRKFDNLTKAERGGLSELDKAGFIKRQLVETRQITKHVAQILDSRMNTKYDENDKLIREVKVITLKSKLVSDFRKDFQFYKVREINNYHHAHDAYLNAVVGTALIKKYPKLESEFVYGDYKVYDVRKMIAKSEQEIGKATAKYFFYSNIMNFFKTEITLANGEIRKRPLIETNGETGEIVWDKGRDFATVRKVLSMPQVNIVKKTEVQTGGFSKESILPKRNSDKLIARKKDWDPKKYGGFDSPTVAYSVLVVAKVEKGKSKKLKSVKELLGITIMERSSFEKNPIDFLEAKGYKEVKKDLIIKLPKYSLFELENGRKRMLASAGELQKGNELALPSKYVNFLYLASHYEKLKGSPEDNEQKQLFVEQHKHYLDEIIEQISEFSKRVILADANLDKVLSAYNKHRDKPIREQAENIIHLFTLTNLGAPAAFKYFDTTIDRKRYTSTKEVLDATLIHQSITGLYETRIDLSQLGGDGGGSSEAAAKPAPGGLLGRDLLTKLKAQIQFSTEGPQVTWEDRPAMCLVLNLEEEYRLHEKPVPPSIDPSWLQLFPMVWAEKAGMGLANQVPPVVVELKSDASPVAVRQYPMSKEAREGIRPHIQRFLDLGILVPCQSPWNTPLLPVKKPGTNDYRPVQDLREVNKRVQDIHPTVPNPYNLLSSLPPSHTWYSVLDLKDAFFCLKLHPNSQPLFAFEWRDPEKGNTGQLTWTRLPQGFKNSPTLFNEALHRDLASFRALNPQVVMLQYVDDLLVAAPTYRDCKEGTRRLLQELSKLGYRVSAKKAQLCREEVTYLGYLLKGGKRWLTPARKATVMKIPTPTTPRQVREFLGTAGFCRLWIPGFASLAAPLYPLTRPKVPFTWTEAHQEAFGRIKEALLSAPALALPDLTKPFALYVDEKEGVARGVLTQTLGPWRRPVAYLSKKLDPVASGWPTCLKAIAAVALLLKDADKLTLGQNVLVIAPHNLESIVRQPPDRWMTNARMTHYQSLLLNERVSFAPPAILNPATLLPVESDDTPIHICSEILAEETGTRPDLRDQPLPGVPAWYTDGSSFIMDGRRQAGAAIVDNKRTVWASNLPEGTSAQKAELIALTQALRLAEGKSINIYTDSRYAFATAHVHGAIYKQRGWLTSAGKDIKNKEEILALLEAIHLPKRVAIIHCPGHQRGTDPVATGNRKADEAAKQAAQSTRILTETTKNAGKRTADGSEFEKRTADGSEFESPKKKAKVE

SEQ ID NO: 7575 - protein, 2218 aa, synthetic construct
MPAAKRVKLDGGDKKYSIGLDIGTNSVGWAVITDEYKVPSKKFKVLGNTDRHSIKKNLIGALLFDSGETAEATRLKRTARRRYTRRKNRICYLQEIFSNEMAKVDDSFFHRLEESFLVEEDKKHERHPIFGNIVDEVAYHEKYPTIYHLRKKLVDSTDKADLRLIYLALAHMIKFRGHFLIEGDLNPDNSDVDKLFIQLVQTYNQLFEENPINASGVDAKAILSARLSKSRRLENLIAQLPGEKKNGLFGNLIALSLGLTPNFKSNFDLAEDAKLQLSKDTYDDDLDNLLAQIGDQYADLFLAAKNLSDAILLSDILRVNTEITKAPLSASMIKRYDEHHQDLTLLKALVRQQLPEKYKEIFFDQSKNGYAGYIDGGASQEEFYKFIKPILEKMDGTEELLVKLNREDLLRKQRTFDNGSIPHQIHLGELHAILRRQEDFYPFLKDNREKIEKILTFRIPYYVGPLARGNSRFAWMTRKSEETITPWNFEEVVDKGASAQSFIERMTNFDKNLPNEKVLPKHSLLYEYFTVYNELTKVKYVTEGMRKPAFLSGEQKKAIVDLLFKTNRKVTVKQLKEDYFKKIECFDSVEISGVEDRFNASLGTYHDLLKIIKDKDFLDNEENEDILEDIVLTLTLFEDREMIEERLKTYAHLFDDKVMKQLKRRRYTGWGRLSRKLINGIRDKQSGKTILDFLKSDGFANRNFMQLIHDDSLTFKEDIQKAQVSGQGDSLHEHIANLAGSPAIKKGILQTVKVVDELVKVMGRHKPENIVIEMARENQTTQKGQKNSRERMKRIEEGIKELGSQILKEHPVENTQLQNEKLYLYYLQNGRDMYVDQELDINRLSDYDVDHIVPQSFLKDDSIDNKVLTRSDKARGKSDNVPSEEVVKKMKNYWRQLLNAKLITQRKFDNLTKAERGGLSELDKAGFIKRQLVETRQITKHVAQILDSRMNTKYDENDKLIREVKVITLKSKLVSDFRKDFQFYKVREINNYHHAHDAYLNAVVGTALIKKYPKLESEFVYGDYKVYDVRKMIAKSEQEIGKATAKYFFYSNIMNFFKTEITLANGEIRKRPLIETNGETGEIVWDKGRDFATVRKVLSMPQVNIVKKTEVQTGGFSKESILPKRNSDKLIARKKDWDPKKYGGFDSPTVAYSVLVVAKVEKGKSKKLKSVKELLGITIMERSSFEKNPIDFLEAKGYKEVKKDLIIKLPKYSLFELENGRKRMLASAGELQKGNELALPSKYVNFLYLASHYEKLKGSPEDNEQKQLFVEQHKHYLDEIIEQISEFSKRVILADANLDKVLSAYNKHRDKPIREQAENIIHLFTLTNLGAPAAFKYFDTTIDRKRYTSTKEVLDATLIHQSITGLYETRIDLSQLGGDGGGSSEAAAKPAPGGTLGDQGSRGSDPLPEPRVTLTVEGIPTEFLVNTGAEHSVLTKPMGKMGSKRTVVAGATGSKVYPWTTKRLLKIGQKQVTHSFLVIPECPAPLLGRDLLTKLKAQIQFSTEGPQVTWEDRPAMCLVLNLEEEYRLHEKPVPPSIDPSWLQLFPMVWAEKAGMGLANQVPPVVVELKSDASPVAVRQYPMSKEAREGIRPHIQRFLDLGILVPCQSPWNTPLLPVKKPGTNDYRPVQDLREVNKRVQDIHPTVPNPYNLLSSLPPSHTWYSVLDLKDAFFCLKLHPNSQPLFAFEWRDPEKGNTGQLTWTRLPQGFKNSPTLFNEALHRDLASFRALNPQVVMLQYVDDLLVAAPTYRDCKEGTRRLLQELSKLGYRVSAKKAQLCREEVTYLGYLLKGGKRWLTPARKATVMKIPTPTTPRQVREFLGTAGFCRLWIPGFASLAAPLYPLTRPKVPFTWTEAHQEAFGRIKEALLSAPALALPDLTKPFALYVDEKEGVARGVLTQTLGPWRRPVAYLSKKLDPVASGWPTCLKAIAAVALLLKDADKLTLGQNVLVIAPHNLESIVRQPPDRWMTNARMTHYQSLLLNERVSFAPPAILNPATLLPVESDDTPIHICSEILAEETGTRPDLRDQPLPGVPAWYTDGSSFIMDGRRQAGAAIVDNKRTVWASNLPEGTSAQKAELIALTQALRLAEGKSINIYTDSRYAFATAHVHGAIYKQRGWLTSAGKDIKNKEEILALLEAIHLPKRVAIIHCPGHQRGTDPVATGNRKADEAAKQAAQSTRILTETTKNAGKRTADGSEFEKRTADGSEFESPKKKAKVE

SEQ ID NO: 7576 - protein, 2218 aa, synthetic construct
MPAAKRVKLDGGDKKYSIGLDIGTNSVGWAVITDEYKVPSKKFKVLGNTDRHSIKKNLIGALLFDSGETAEATRLKRTARRRYTRRKNRICYLQEIFSNEMAKVDDSFFHRLEESFLVEEDKKHERHPIFGNIVDEVAYHEKYPTIYHLRKKLVDSTDKADLRLIYLALAHMIKFRGHFLIEGDLNPDNSDVDKLFIQLVQTYNQLFEENPINASGVDAKAILSARLSKSRRLENLIAQLPGEKKNGLFGNLIALSLGLTPNFKSNFDLAEDAKLQLSKDTYDDDLDNLLAQIGDQYADLFLAAKNLSDAILLSDILRVNTEITKAPLSASMIKRYDEHHQDLTLLKALVRQQLPEKYKEIFFDQSKNGYAGYIDGGASQEEFYKFIKPILEKMDGTEELLVKLNREDLLRKQRTFDNGSIPHQIHLGELHAILRRQEDFYPFLKDNREKIEKILTFRIPYYVGPLARGNSRFAWMTRKSEETITPWNFEEVVDKGASAQSFIERMTNFDKNLPNEKVLPKHSLLYEYFTVYNELTKVKYVTEGMRKPAFLSGEQKKAIVDLLFKTNRKVTVKQLKEDYFKKIECFDSVEISGVEDRFNASLGTYHDLLKIIKDKDFLDNEENEDILEDIVLTLTLFEDREMIEERLKTYAHLFDDKVMKQLKRRRYTGWGRLSRKLINGIRDKQSGKTILDFLKSDGFANRNFMQLIHDDSLTFKEDIQKAQVSGQGDSLHEHIANLAGSPAIKKGILQTVKVVDELVKVMGRHKPENIVIEMARENQTTQKGQKNSRERMKRIEEGIKELGSQILKEHPVENTQLQNEKLYLYYLQNGRDMYVDQELDINRLSDYDVDHIVPQSFLKDDSIDNKVLTRSDKARGKSDNVPSEEVVKKMKNYWRQLLNAKLITQRKFDNLTKAERGGLSELDKAGFIKRQLVETRQITKHVAQILDSRMNTKYDENDKLIREVKVITLKSKLVSDFRKDFQFYKVREINNYHHAHDAYLNAVVGTALIKKYPKLESEFVYGDYKVYDVRKMIAKSEQEIGKATAKYFFYSNIMNFFKTEITLANGEIRKRPLIETNGETGEIVWDKGRDFATVRKVLSMPQVNIVKKTEVQTGGFSKESILPKRNSDKLIARKKDWDPKKYGGFDSPTVAYSVLVVAKVEKGKSKKLKSVKELLGITIMERSSFEKNPIDFLEAKGYKEVKKDLIIKLPKYSLFELENGRKRMLASAGELQKGNELALPSKYVNFLYLASHYEKLKGSPEDNEQKQLFVEQHKHYLDEIIEQISEFSKRVILADANLDKVLSAYNKHRDKPIREQAENIIHLFTLTNLGAPAAFKYFDTTIDRKRYTSTKEVLDATLIHQSITGLYETRIDLSQLGGDGGGSSEAAAKPAPGGTLGDQGSRGSDPLPEPRVTLTVEGIPTEFLVNTGAEHSVLTKPMGKMGSKRTVVAGATGSKVYPWTTKRLLKIGQKQVTHSFLVIPECPAPLLGRDLLTKLKAQIQFSTEGPQVTWEDRPAMCLVLNLEEEYRLHEKPVPPSIDPSWLQLFPMVWAEKAGMGLANQVPPVVVELKSDASPVAVRQYPMSKEAREGIRPHIQRFLDLGILVPCQSPWNTPLLPVKKPGTNDYRPVQDLREVNKRVQDIHPTVPNPYNLLSSLPPSHTWYSVLDLKDAFFCLKLHPNSQPLFAFEWRDPEKGNTGQLTWTRLPQGFKNSPTLFNEALHRDLASFRALNPQVVMLQYVDDLLVAAPTYRDCKEGTRRLLQELSKLGYRVSAKKAQLCREEVTYLGYLLKGGKRWLTPARKATVMKIPTPTTPRQVREFLGKAGFCRLFIPGFASLAAPLYPLTRPKVPFTWTEAHQEAFGRIKEALLSAPALALPDLTKPFALYVDEKEGVARGVLTQTLGPWRRPVAYLSKKLDPVASGWPTCLKAIAAVALLLKDADKLTLGQNVLVIAPHNLESIVRQPPDRWMTNARMTHYQSLLLNERVSFAPPAILNPATLLPVESDDTPIHICSEILAEETGTRPDLRDQPLPGVPAWYTDGSSFIMDGRRQAGAAIVDNKRTVWASNLPEGTSAQKAELIALTQALRLAEGKSINIYTDSRYAFATAHVHGAIYKQRGWLTSAGKDIKNKEEILALLEAIHLPKRVAIIHCPGHQRGTDPVATGNRKADEAAKQAAQSTRILTETTKNAGKRTADGSEFEKRTADGSEFESPKKKAKVE

SEQ ID NO: 7577 - protein, 2096 aa, synthetic construct
MPAAKRVKLDGGDKKYSIGLDIGTNSVGWAVITDEYKVPSKKFKVLGNTDRHSIKKNLIGALLFDSGETAEATRLKRTARRRYTRRKNRICYLQEIFSNEMAKVDDSFFHRLEESFLVEEDKKHERHPIFGNIVDEVAYHEKYPTIYHLRKKLVDSTDKADLRLIYLALAHMIKFRGHFLIEGDLNPDNSDVDKLFIQLVQTYNQLFEENPINASGVDAKAILSARLSKSRRLENLIAQLPGEKKNGLFGNLIALSLGLTPNFKSNFDLAEDAKLQLSKDTYDDDLDNLLAQIGDQYADLFLAAKNLSDAILLSDILRVNTEITKAPLSASMIKRYDEHHQDLTLLKALVRQQLPEKYKEIFFDQSKNGYAGYIDGGASQEEFYKFIKPILEKMDGTEELLVKLNREDLLRKQRTFDNGSIPHQIHLGELHAILRRQEDFYPFLKDNREKIEKILTFRIPYYVGPLARGNSRFAWMTRKSEETITPWNFEEVVDKGASAQSFIERMTNFDKNLPNEKVLPKHSLLYEYFTVYNELTKVKYVTEGMRKPAFLSGEQKKAIVDLLFKTNRKVTVKQLKEDYFKKIECFDSVEISGVEDRFNASLGTYHDLLKIIKDKDFLDNEENEDILEDIVLTLTLFEDREMIEERLKTYAHLFDDKVMKQLKRRRYTGWGRLSRKLINGIRDKQSGKTILDFLKSDGFANRNFMQLIHDDSLTFKEDIQKAQVSGQGDSLHEHIANLAGSPAIKKGILQTVKVVDELVKVMGRHKPENIVIEMARENQTTQKGQKNSRERMKRIEEGIKELGSQILKEHPVENTQLQNEKLYLYYLQNGRDMYVDQELDINRLSDYDVDHIVPQSFLKDDSIDNKVLTRSDKARGKSDNVPSEEVVKKMKNYWRQLLNAKLITQRKFDNLTKAERGGLSELDKAGFIKRQLVETRQITKHVAQILDSRMNTKYDENDKLIREVKVITLKSKLVSDFRKDFQFYKVREINNYHHAHDAYLNAVVGTALIKKYPKLESEFVYGDYKVYDVRKMIAKSEQEIGKATAKYFFYSNIMNFFKTEITLANGEIRKRPLIETNGETGEIVWDKGRDFATVRKVLSMPQVNIVKKTEVQTGGFSKESILPKRNSDKLIARKKDWDPKKYGGFDSPTVAYSVLVVAKVEKGKSKKLKSVKELLGITIMERSSFEKNPIDFLEAKGYKEVKKDLIIKLPKYSLFELENGRKRMLASAGELQKGNELALPSKYVNFLYLASHYEKLKGSPEDNEQKQLFVEQHKHYLDEIIEQISEFSKRVILADANLDKVLSAYNKHRDKPIREQAENIIHLFTLTNLGAPAAFKYFDTTIDRKRYTSTKEVLDATLIHQSITGLYETRIDLSQLGGDGGGSSEAAAKPAPGGTLNLEDEYRLYETSAEPEVSPGSTWLSDFPQAWAETGGMGLAVRQAPLIIPLKATSTPVSIKQYPMSQEAKLGIKPHIQRLLDQGILVPCQSPWNTPLLPVKKPGTNDYRPVQDLREVNKRVEDIHPTVPNPYNLLSGLPPSHRWYTVLDLKDAFFCLRLHPTSQPLFAFEWRDPGMGISGQLTWTRLPQGFKNSPTLFNEALHRDLADFRIQHPDLILLQYVDDILLAATSELDCQQGTRALLLTLGNLGYRASAKKAQLCQKQVKYLGYLLKEGQRWLTEARKETVMGQPTPKTPRQLREFLGTAGFCRLWIPGFAEMAAPLYPLTKPGTLFNWGPDQQKAYQEIKQALLTAPALGLPDLTKPFELFVDEKQGYAKGVLTQKLGPWRRPVAYLSKKLDPVAAGWPPCLRMVAAIAVLRKDAGKLTMGQPLVILAPHAVEALVKQPPDRWLSNARMTHYQAMLLDTDRVQFGPVVALNPATLLPLPEEGAPHDCLEILAETHGTRPDLTDQPIPDADHTWYTDGSSFLQEGQRKAGAAVTTETEVIWARALPAGTSAQRAELIALTQALKMAEGKRLNVYTDSRYAFATAHIHGEIYRRRGWLTSEGREIKNKSEILALLKALFLPKRLSIIHCLGHQKGDSAEARGNRLADQAAREAAIKTPPDTSTLLAGKRTADGSEFEKRTADGSEFESPKKKAKVE

SEQ ID NO: 7578 - protein, 2096 aa, synthetic construct
MPAAKRVKLDGGDKKYSIGLDIGTNSVGWAVITDEYKVPSKKFKVLGNTDRHSIKKNLIGALLFDSGETAEATRLKRTARRRYTRRKNRICYLQEIFSNEMAKVDDSFFHRLEESFLVEEDKKHERHPIFGNIVDEVAYHEKYPTIYHLRKKLVDSTDKADLRLIYLALAHMIKFRGHFLIEGDLNPDNSDVDKLFIQLVQTYNQLFEENPINASGVDAKAILSARLSKSRRLENLIAQLPGEKKNGLFGNLIALSLGLTPNFKSNFDLAEDAKLQLSKDTYDDDLDNLLAQIGDQYADLFLAAKNLSDAILLSDILRVNTEITKAPLSASMIKRYDEHHQDLTLLKALVRQQLPEKYKEIFFDQSKNGYAGYIDGGASQEEFYKFIKPILEKMDGTEELLVKLNREDLLRKQRTFDNGSIPHQIHLGELHAILRRQEDFYPFLKDNREKIEKILTFRIPYYVGPLARGNSRFAWMTRKSEETITPWNFEEVVDKGASAQSFIERMTNFDKNLPNEKVLPKHSLLYEYFTVYNELTKVKYVTEGMRKPAFLSGEQKKAIVDLLFKTNRKVTVKQLKEDYFKKIECFDSVEISGVEDRFNASLGTYHDLLKIIKDKDFLDNEENEDILEDIVLTLTLFEDREMIEERLKTYAHLFDDKVMKQLKRRRYTGWGRLSRKLINGIRDKQSGKTILDFLKSDGFANRNFMQLIHDDSLTFKEDIQKAQVSGQGDSLHEHIANLAGSPAIKKGILQTVKVVDELVKVMGRHKPENIVIEMARENQTTQKGQKNSRERMKRIEEGIKELGSQILKEHPVENTQLQNEKLYLYYLQNGRDMYVDQELDINRLSDYDVDHIVPQSFLKDDSIDNKVLTRSDKARGKSDNVPSEEVVKKMKNYWRQLLNAKLITQRKFDNLTKAERGGLSELDKAGFIKRQLVETRQITKHVAQILDSRMNTKYDENDKLIREVKVITLKSKLVSDFRKDFQFYKVREINNYHHAHDAYLNAVVGTALIKKYPKLESEFVYGDYKVYDVRKMIAKSEQEIGKATAKYFFYSNIMNFFKTEITLANGEIRKRPLIETNGETGEIVWDKGRDFATVRKVLSMPQVNIVKKTEVQTGGFSKESILPKRNSDKLIARKKDWDPKKYGGFDSPTVAYSVLVVAKVEKGKSKKLKSVKELLGITIMERSSFEKNPIDFLEAKGYKEVKKDLIIKLPKYSLFELENGRKRMLASAGELQKGNELALPSKYVNFLYLASHYEKLKGSPEDNEQKQLFVEQHKHYLDEIIEQISEFSKRVILADANLDKVLSAYNKHRDKPIREQAENIIHLFTLTNLGAPAAFKYFDTTIDRKRYTSTKEVLDATLIHQSITGLYETRIDLSQLGGDGGGSSEAAAKPAPGGTLNLEDEYRLYETSAEPEVSPGSTWLSDFPQAWAETGGMGLAVRQAPLIIPLKATSTPVSIKQYPMSQEAKLGIKPHIQRLLDQGILVPCQSPWNTPLLPVKKPGTNDYRPVQDLREVNKRVEDIHPTVPNPYNLLSGLPPSHRWYTVLDLKDAFFCLRLHPTSQPLFAFEWRDPGMGISGQLTWTRLPQGFKNSPTLFNEALHRDLADFRIQHPDLILLQYVDDILLAATSELDCQQGTRALLLTLGNLGYRASAKKAQLCQKQVKYLGYLLKEGQRWLTEARKETVMGQPTPKTPRQLREFLGKAGFCRLFIPGFAEMAAPLYPLTKPGTLFNWGPDQQKAYQEIKQALLTAPALGLPDLTKPFELFVDEKQGYAKGVLTQKLGPWRRPVAYLSKKLDPVAAGWPPCLRMVAAIAVLRKDAGKLTMGQPLVILAPHAVEALVKQPPDRWLSNARMTHYQAMLLDTDRVQFGPVVALNPATLLPLPEEGAPHDCLEILAETHGTRPDLTDQPIPDADHTWYTDGSSFLQEGQRKAGAAVTTETEVIWARALPAGTSAQRAELIALTQALKMAEGKRLNVYTDSRYAFATAHIHGEIYRRRGWLTSEGREIKNKSEILALLKALFLPKRLSIIHCLGHQKGDSAEARGNRLADQAAREAAIKTPPDTSTLLAGKRTADGSEFEKRTADGSEFESPKKKAKVE

SEQ ID NO: 7579 - protein, 2096 aa, synthetic construct
MPAAKRVKLDGGDKKYSIGLDIGTNSVGWAVITDEYKVPSKKFKVLGNTDRHSIKKNLIGALLFDSGETAEATRLKRTARRRYTRRKNRICYLQEIFSNEMAKVDDSFFHRLEESFLVEEDKKHERHPIFGNIVDEVAYHEKYPTIYHLRKKLVDSTDKADLRLIYLALAHMIKFRGHFLIEGDLNPDNSDVDKLFIQLVQTYNQLFEENPINASGVDAKAILSARLSKSRRLENLIAQLPGEKKNGLFGNLIALSLGLTPNFKSNFDLAEDAKLQLSKDTYDDDLDNLLAQIGDQYADLFLAAKNLSDAILLSDILRVNTEITKAPLSASMIKRYDEHHQDLTLLKALVRQQLPEKYKEIFFDQSKNGYAGYIDGGASQEEFYKFIKPILEKMDGTEELLVKLNREDLLRKQRTFDNGSIPHQIHLGELHAILRRQEDFYPFLKDNREKIEKILTFRIPYYVGPLARGNSRFAWMTRKSEETITPWNFEEVVDKGASAQSFIERMTNFDKNLPNEKVLPKHSLLYEYFTVYNELTKVKYVTEGMRKPAFLSGEQKKAIVDLLFKTNRKVTVKQLKEDYFKKIECFDSVEISGVEDRFNASLGTYHDLLKIIKDKDFLDNEENEDILEDIVLTLTLFEDREMIEERLKTYAHLFDDKVMKQLKRRRYTGWGRLSRKLINGIRDKQSGKTILDFLKSDGFANRNFMQLIHDDSLTFKEDIQKAQVSGQGDSLHEHIANLAGSPAIKKGILQTVKVVDELVKVMGRHKPENIVIEMARENQTTQKGQKNSRERMKRIEEGIKELGSQILKEHPVENTQLQNEKLYLYYLQNGRDMYVDQELDINRLSDYDVDHIVPQSFLKDDSIDNKVLTRSDKARGKSDNVPSEEVVKKMKNYWRQLLNAKLITQRKFDNLTKAERGGLSELDKAGFIKRQLVETRQITKHVAQILDSRMNTKYDENDKLIREVKVITLKSKLVSDFRKDFQFYKVREINNYHHAHDAYLNAVVGTALIKKYPKLESEFVYGDYKVYDVRKMIAKSEQEIGKATAKYFFYSNIMNFFKTEITLANGEIRKRPLIETNGETGEIVWDKGRDFATVRKVLSMPQVNIVKKTEVQTGGFSKESILPKRNSDKLIARKKDWDPKKYGGFDSPTVAYSVLVVAKVEKGKSKKLKSVKELLGITIMERSSFEKNPIDFLEAKGYKEVKKDLIIKLPKYSLFELENGRKRMLASAGELQKGNELALPSKYVNFLYLASHYEKLKGSPEDNEQKQLFVEQHKHYLDEIIEQISEFSKRVILADANLDKVLSAYNKHRDKPIREQAENIIHLFTLTNLGAPAAFKYFDTTIDRKRYTSTKEVLDATLIHQSITGLYETRIDLSQLGGDGGGSSEAAAKPAPGGTLGIEDEYRLHETSTEPDVSLGSTWLSDFPQAWAETGGMGLAVRQAPLIIPLKATSTPVSIQQYPMSHEARLGIKPHIQRLLDQGILVPCQSPWNTPLLPVKKPGTNDYRPVQDLREVNKRVEDIHPTVPNPYNLLSGLPPSHQWYTVLDLKDAFFCLRLHPTSQPLFAFEWRDPGMGISGQLTWTRLPQGFKNSPTLFDEALHRDLADFRIQHPDLILLQYVDDILLAATSELDCQQGTRALLQTLGDLGYRASAKKAQICQKQVKYLGYLLREGQRWLTEARKETVMGQPVPKTPRQLREFLGTAGFCRLWIPGFAEMAAPLYPLTKTGTLFSWGPDQQKAYQEIKQALLTAPALGLPDLTKPFELFVDEKQGYAKGVLTQKLGPWRRPVAYLSKKLDPVAAGWPPCLRMVAAIAVLTKDAGKLTMGQPLVILAPHAVEALVKQPPDRWLSNARMTHYQAMLLDTDRVQFGPVVALNPATLLPLPEEGAPHDCLEILAETHGTRPDLTDQPIPDADHTWYTDGSSFLQEGQRKAGAAVTTETEVIWAGALPAGTSAQRAELIALTQALKMAEGKRLNVYTDSRYAFATAHIHGEIYRRRGLLTSEGREIKNKSEILALLKALFLPKRLSIIHCLGHQKGDSAEARGNRLADQAAREAAIKTPPDTSTLLAGKRTADGSEFEKRTADGSEFESPKKKAKVE

SEQ ID NO: 7580 - protein, 2096 aa, synthetic construct
MPAAKRVKLDGGDKKYSIGLDIGTNSVGWAVITDEYKVPSKKFKVLGNTDRHSIKKNLIGALLFDSGETAEATRLKRTARRRYTRRKNRICYLQEIFSNEMAKVDDSFFHRLEESFLVEEDKKHERHPIFGNIVDEVAYHEKYPTIYHLRKKLVDSTDKADLRLIYLALAHMIKFRGHFLIEGDLNPDNSDVDKLFIQLVQTYNQLFEENPINASGVDAKAILSARLSKSRRLENLIAQLPGEKKNGLFGNLIALSLGLTPNFKSNFDLAEDAKLQLSKDTYDDDLDNLLAQIGDQYADLFLAAKNLSDAILLSDILRVNTEITKAPLSASMIKRYDEHHQDLTLLKALVRQQLPEKYKEIFFDQSKNGYAGYIDGGASQEEFYKFIKPILEKMDGTEELLVKLNREDLLRKQRTFDNGSIPHQIHLGELHAILRRQEDFYPFLKDNREKIEKILTFRIPYYVGPLARGNSRFAWMTRKSEETITPWNFEEVVDKGASAQSFIERMTNFDKNLPNEKVLPKHSLLYEYFTVYNELTKVKYVTEGMRKPAFLSGEQKKAIVDLLFKTNRKVTVKQLKEDYFKKIECFDSVEISGVEDRFNASLGTYHDLLKIIKDKDFLDNEENEDILEDIVLTLTLFEDREMIEERLKTYAHLFDDKVMKQLKRRRYTGWGRLSRKLINGIRDKQSGKTILDFLKSDGFANRNFMQLIHDDSLTFKEDIQKAQVSGQGDSLHEHIANLAGSPAIKKGILQTVKVVDELVKVMGRHKPENIVIEMARENQTTQKGQKNSRERMKRIEEGIKELGSQILKEHPVENTQLQNEKLYLYYLQNGRDMYVDQELDINRLSDYDVDHIVPQSFLKDDSIDNKVLTRSDKARGKSDNVPSEEVVKKMKNYWRQLLNAKLITQRKFDNLTKAERGGLSELDKAGFIKRQLVETRQITKHVAQILDSRMNTKYDENDKLIREVKVITLKSKLVSDFRKDFQFYKVREINNYHHAHDAYLNAVVGTALIKKYPKLESEFVYGDYKVYDVRKMIAKSEQEIGKATAKYFFYSNIMNFFKTEITLANGEIRKRPLIETNGETGEIVWDKGRDFATVRKVLSMPQVNIVKKTEVQTGGFSKESILPKRNSDKLIARKKDWDPKKYGGFDSPTVAYSVLVVAKVEKGKSKKLKSVKELLGITIMERSSFEKNPIDFLEAKGYKEVKKDLIIKLPKYSLFELENGRKRMLASAGELQKGNELALPSKYVNFLYLASHYEKLKGSPEDNEQKQLFVEQHKHYLDEIIEQISEFSKRVILADANLDKVLSAYNKHRDKPIREQAENIIHLFTLTNLGAPAAFKYFDTTIDRKRYTSTKEVLDATLIHQSITGLYETRIDLSQLGGDGGGSSEAAAKPAPGGTLNIEDEYRLHETSKEPDVSLGSTWLSDFPQAWAETGGMGLAVRQAPLIIPLKATSTPVSIKQYPMSQEARLGIKPHIQRLLDQGILVPCQSPWNTPLLPVKKPGTNDYRPVQDLREVNKRVEDIHPTVPNPYNLLSGLPPSHQWYTVLDLKDAFFCLRLHPTSQPLFAFEWRDPEMGISGQLTWTRLPQGFKNSPTLFNEALHRDLAGFRIQHPDLILLQYVDDLLLAATSELDCQQGTRALLQTLGDLGYRASAKKAQICQKQVKYLGYLLKEGQRWLTEARKETVMGQPIPKTPRQLREFLGTAGFCRLWIPGFAEMAAPLYPLTKPGTLFNWGPDQQKAFQEIKQALLTAPALGLPDLTKPFELFVDEKQGYAKGVLTQKLGPWRRPVAYLSKKLDPVAAGWPPCLRMVAAIAVLTKDAGKLTMGQPLVILAPHAVEALVKQPPDRWLSNARMTHYQALLLDTDRVQFGPVVALNPATLLPLPEEGLQHDCLDILAEAHGTRSDLMDQPLPDADHTWYTDGSSFLQEGQRKAGAAVTTETEVIWARALPAGTSAQRAELIALTQALKMAEGKKLNVYTDSRYAFATAHIHGEIYRRRGWLTSEGKEIKNKDEILALLKALFLPKRLSIIHCPGHQKGNSAEARGNRMADQAAREVATRETPETSTLLAGKRTADGSEFEKRTADGSEFESPKKKAKVE

SEQ ID NO: 7581 - protein, 2096 aa, synthetic construct
MPAAKRVKLDGGDKKYSIGLDIGTNSVGWAVITDEYKVPSKKFKVLGNTDRHSIKKNLIGALLFDSGETAEATRLKRTARRRYTRRKNRICYLQEIFSNEMAKVDDSFFHRLEESFLVEEDKKHERHPIFGNIVDEVAYHEKYPTIYHLRKKLVDSTDKADLRLIYLALAHMIKFRGHFLIEGDLNPDNSDVDKLFIQLVQTYNQLFEENPINASGVDAKAILSARLSKSRRLENLIAQLPGEKKNGLFGNLIALSLGLTPNFKSNFDLAEDAKLQLSKDTYDDDLDNLLAQIGDQYADLFLAAKNLSDAILLSDILRVNTEITKAPLSASMIKRYDEHHQDLTLLKALVRQQLPEKYKEIFFDQSKNGYAGYIDGGASQEEFYKFIKPILEKMDGTEELLVKLNREDLLRKQRTFDNGSIPHQIHLGELHAILRRQEDFYPFLKDNREKIEKILTFRIPYYVGPLARGNSRFAWMTRKSEETITPWNFEEVVDKGASAQSFIERMTNFDKNLPNEKVLPKHSLLYEYFTVYNELTKVKYVTEGMRKPAFLSGEQKKAIVDLLFKTNRKVTVKQLKEDYFKKIECFDSVEISGVEDRFNASLGTYHDLLKIIKDKDFLDNEENEDILEDIVLTLTLFEDREMIEERLKTYAHLFDDKVMKQLKRRRYTGWGRLSRKLINGIRDKQSGKTILDFLKSDGFANRNFMQLIHDDSLTFKEDIQKAQVSGQGDSLHEHIANLAGSPAIKKGILQTVKVVDELVKVMGRHKPENIVIEMARENQTTQKGQKNSRERMKRIEEGIKELGSQILKEHPVENTQLQNEKLYLYYLQNGRDMYVDQELDINRLSDYDVDHIVPQSFLKDDSIDNKVLTRSDKARGKSDNVPSEEVVKKMKNYWRQLLNAKLITQRKFDNLTKAERGGLSELDKAGFIKRQLVETRQITKHVAQILDSRMNTKYDENDKLIREVKVITLKSKLVSDFRKDFQFYKVREINNYHHAHDAYLNAVVGTALIKKYPKLESEFVYGDYKVYDVRKMIAKSEQEIGKATAKYFFYSNIMNFFKTEITLANGEIRKRPLIETNGETGEIVWDKGRDFATVRKVLSMPQVNIVKKTEVQTGGFSKESILPKRNSDKLIARKKDWDPKKYGGFDSPTVAYSVLVVAKVEKGKSKKLKSVKELLGITIMERSSFEKNPIDFLEAKGYKEVKKDLIIKLPKYSLFELENGRKRMLASAGELQKGNELALPSKYVNFLYLASHYEKLKGSPEDNEQKQLFVEQHKHYLDEIIEQISEFSKRVILADANLDKVLSAYNKHRDKPIREQAENIIHLFTLTNLGAPAAFKYFDTTIDRKRYTSTKEVLDATLIHQSITGLYETRIDLSQLGGDGGGSSEAAAKPAPGGTLNIEDEYRLHEISTEPDVSPGSTWLSDFPQAWAETGGMGLAVRQAPLIIPLKATSTPVSIKQYPMSQEAKLGIKPHIQRLLDQGILVPCQSPWNTPLLPVKKPGTNDYRPVQGLREVNKRVEDIHPTVPNPYNLLSGLPTSHRWYTVLDLKDAFFCLRLHPTSQPLFASEWRDPGMGISGQLTWTRLPQGFKNSPTLFNEALHRGLADFRIQHPDLILLQYVDDLLLAATSELDCQQGTRALLKTLGNLGYRASAKKAQICQKQVKYLGYLLREGQRWLTEARKETVMGQPTPKTPRQLREFLGKAGFCRLFIPRFAEMAAPLYPLTKPGTLFNWGPDQQKAYHEIKQALLTAPALGLPDLTKPFELFVDEKQGYAKGVLTQKLGPWRRPVAYLSKKLDPVAAGWPPCLRMVAAIAVLTKDAGKLTMGQPLVILAPHAVEALVKQPPDRWLSNARMTHYQAMLLDTDRVQFGPVVALNPATLLPLPEEGAPHDCLEILAETHGTEPDLTDQPIPDADHTWYTDGSSFLQEGQRKAGAAVTTETEVIWARALPAGTSAQRAELIALTQALKMAEGKRLNVYTDSRYAFATAHIHGEIYKRRGWLTSEGREIKNKSEILALLKALFLPKRLSIIHCLGHQKGDSAEARGNRLADQAAREAAIKTPPDTSTLLAGKRTADGSEFEKRTADGSEFESPKKKAKVE

SEQ ID NO: 7582 - protein, 2090 aa, synthetic construct
MPAAKRVKLDGGDKKYSIGLDIGTNSVGWAVITDEYKVPSKKFKVLGNTDRHSIKKNLIGALLFDSGETAEATRLKRTARRRYTRRKNRICYLQEIFSNEMAKVDDSFFHRLEESFLVEEDKKHERHPIFGNIVDEVAYHEKYPTIYHLRKKLVDSTDKADLRLIYLALAHMIKFRGHFLIEGDLNPDNSDVDKLFIQLVQTYNQLFEENPINASGVDAKAILSARLSKSRRLENLIAQLPGEKKNGLFGNLIALSLGLTPNFKSNFDLAEDAKLQLSKDTYDDDLDNLLAQIGDQYADLFLAAKNLSDAILLSDILRVNTEITKAPLSASMIKRYDEHHQDLTLLKALVRQQLPEKYKEIFFDQSKNGYAGYIDGGASQEEFYKFIKPILEKMDGTEELLVKLNREDLLRKQRTFDNGSIPHQIHLGELHAILRRQEDFYPFLKDNREKIEKILTFRIPYYVGPLARGNSRFAWMTRKSEETITPWNFEEVVDKGASAQSFIERMTNFDKNLPNEKVLPKHSLLYEYFTVYNELTKVKYVTEGMRKPAFLSGEQKKAIVDLLFKTNRKVTVKQLKEDYFKKIECFDSVEISGVEDRFNASLGTYHDLLKIIKDKDFLDNEENEDILEDIVLTLTLFEDREMIEERLKTYAHLFDDKVMKQLKRRRYTGWGRLSRKLINGIRDKQSGKTILDFLKSDGFANRNFMQLIHDDSLTFKEDIQKAQVSGQGDSLHEHIANLAGSPAIKKGILQTVKVVDELVKVMGRHKPENIVIEMARENQTTQKGQKNSRERMKRIEEGIKELGSQILKEHPVENTQLQNEKLYLYYLQNGRDMYVDQELDINRLSDYDVDHIVPQSFLKDDSIDNKVLTRSDKARGKSDNVPSEEVVKKMKNYWRQLLNAKLITQRKFDNLTKAERGGLSELDKAGFIKRQLVETRQITKHVAQILDSRMNTKYDENDKLIREVKVITLKSKLVSDFRKDFQFYKVREINNYHHAHDAYLNAVVGTALIKKYPKLESEFVYGDYKVYDVRKMIAKSEQEIGKATAKYFFYSNIMNFFKTEITLANGEIRKRPLIETNGETGEIVWDKGRDFATVRKVLSMPQVNIVKKTEVQTGGFSKESILPKRNSDKLIARKKDWDPKKYGGFDSPTVAYSVLVVAKVEKGKSKKLKSVKELLGITIMERSSFEKNPIDFLEAKGYKEVKKDLIIKLPKYSLFELENGRKRMLASAGELQKGNELALPSKYVNFLYLASHYEKLKGSPEDNEQKQLFVEQHKHYLDEIIEQISEFSKRVILADANLDKVLSAYNKHRDKPIREQAENIIHLFTLTNLGAPAAFKYFDTTIDRKRYTSTKEVLDATLIHQSITGLYETRIDLSQLGGDGGGSSEAAAKPAPGGTLQLDDEYRLYSPLVKPDQNIQFWLEQFPQAWAETAGMGLAKQVPPQVIQLKASATPVSVRQYPLSKEAQEGIRPHVQRLIQQGILVPVQSPWNTPLLPVRKPGTNDYRPVQDLREVNKRVQDIHPTVPNPYNLLCALPPQRSWYTVLDLKDAFFCLRLHPTSQPLFAFEWRDPGTGRTGQLTWTRLPQGFKNSPTIFDEALHRDLANFRIQHPQVTLLQYVDDLLLAGATKQDCLEGTKALLLELSDLGYRASAKKAQICRREVTYLGYSLRDGQRWLTEARKKTVVQIPAPTTAKQVREFLGTAGFCRLWIPGFATLAAPLYPLTKEKGEFSWAPEHQKAFDAIKKALLSAPALALPDVTKPFTLYVDERKGVARGVLTQTLGPWRRPVAYLSKKLDPVASGWPVCLKAIAAVAILVKDADKLTLGQNITVIAPHALENIVRQPPDRWMTNARMTHYQSLLLTERVTFAPPAALNPATLLPEETDEPVTHDCHQLLIEETGVRKDLTDIPLTGEVLTWFTDGSSYVVEGKRMAGAAVVDGTRTIWASSLPEGTSAQKAELMALTQALRLAEGKSINIYTDSRYAFATAHVHGAIYKQRGLLTSAGREIKNKEEILSLLEALHLPKRLAIIHCPGHQKAKDPISRGNQMADRVAKQAAQGVNLLAGKRTADGSEFEKRTADGSEFESPKKKAKVE

SEQ ID NO: 7583 - protein, 2176 aa, synthetic construct
MPAAKRVKLDGGDKKYSIGLDIGTNSVGWAVITDEYKVPSKKFKVLGNTDRHSIKKNLIGALLFDSGETAEATRLKRTARRRYTRRKNRICYLQEIFSNEMAKVDDSFFHRLEESFLVEEDKKHERHPIFGNIVDEVAYHEKYPTIYHLRKKLVDSTDKADLRLIYLALAHMIKFRGHFLIEGDLNPDNSDVDKLFIQLVQTYNQLFEENPINASGVDAKAILSARLSKSRRLENLIAQLPGEKKNGLFGNLIALSLGLTPNFKSNFDLAEDAKLQLSKDTYDDDLDNLLAQIGDQYADLFLAAKNLSDAILLSDILRVNTEITKAPLSASMIKRYDEHHQDLTLLKALVRQQLPEKYKEIFFDQSKNGYAGYIDGGASQEEFYKFIKPILEKMDGTEELLVKLNREDLLRKQRTFDNGSIPHQIHLGELHAILRRQEDFYPFLKDNREKIEKILTFRIPYYVGPLARGNSRFAWMTRKSEETITPWNFEEVVDKGASAQSFIERMTNFDKNLPNEKVLPKHSLLYEYFTVYNELTKVKYVTEGMRKPAFLSGEQKKAIVDLLFKTNRKVTVKQLKEDYFKKIECFDSVEISGVEDRFNASLGTYHDLLKIIKDKDFLDNEENEDILEDIVLTLTLFEDREMIEERLKTYAHLFDDKVMKQLKRRRYTGWGRLSRKLINGIRDKQSGKTILDFLKSDGFANRNFMQLIHDDSLTFKEDIQKAQVSGQGDSLHEHIANLAGSPAIKKGILQTVKVVDELVKVMGRHKPENIVIEMARENQTTQKGQKNSRERMKRIEEGIKELGSQILKEHPVENTQLQNEKLYLYYLQNGRDMYVDQELDINRLSDYDVDHIVPQSFLKDDSIDNKVLTRSDKARGKSDNVPSEEVVKKMKNYWRQLLNAKLITQRKFDNLTKAERGGLSELDKAGFIKRQLVETRQITKHVAQILDSRMNTKYDENDKLIREVKVITLKSKLVSDFRKDFQFYKVREINNYHHAHDAYLNAVVGTALIKKYPKLESEFVYGDYKVYDVRKMIAKSEQEIGKATAKYFFYSNIMNFFKTEITLANGEIRKRPLIETNGETGEIVWDKGRDFATVRKVLSMPQVNIVKKTEVQTGGFSKESILPKRNSDKLIARKKDWDPKKYGGFDSPTVAYSVLVVAKVEKGKSKKLKSVKELLGITIMERSSFEKNPIDFLEAKGYKEVKKDLIIKLPKYSLFELENGRKRMLASAGELQKGNELALPSKYVNFLYLASHYEKLKGSPEDNEQKQLFVEQHKHYLDEIIEQISEFSKRVILADANLDKVLSAYNKHRDKPIREQAENIIHLFTLTNLGAPAAFKYFDTTIDRKRYTSTKEVLDATLIHQSITGLYETRIDLSQLGGDGGGSSEAAAKPAPGGMDPLQLLQPLEAEIKGTKLKAHWNSGATITCVPQAFLEEEVPIKNIWIKTIHGEKEQPVYYLTFKIQGRKVEAEVISSPYDYILVSPSDIPWLMKKPLQLTTLVPLQEYEERLLKQTMLTGSYKEKLQSLFLKYDALWQHWENQVGHRRIKPHHIATGTVNPRPQKQYPINPKAKASIQTVINDLLKQGVLIQQNSIMNTPVYPVPKPDGKWRMVLDYREVNKTIPLIAAQNQHSAGILSSIFRGKYKTTLDLSNGFWAHSITPESYWLTAFTWLGQQYCWTRLPQGFLNSPALFNADVVDLLKEVPNVQVYVDDIYISHDDPREHLEQLEKVFSLLLNAGYVVSLKKSEIAQHEVEFLGFNITKEGRGLTETFKQKLLNITPPRDLKQLQSILGKLNFARNFIPNFSELVKPLYNIIATAPGKYITWTTDNSQQLQNIISMLNSAENLEERNPEVRLIMKVNTSPSAGYIRFYNEFAKRPIMYLNYVYTKAEVKFTNTEKLLTTIHKGLIKALDLGMGQEILVYSPIVSMTKIQKTPLPERKALPIRWITWMSYLEDPRIQFHYDKTLPELQQVPTVTDDIIAKIKHPSEFSMVFYTDGSAIKHPNVNKSHNAGMGIAQVQFKPEFTVINTWSIPLGDHTAQLAEVAAVEFACKKALKIDGPVLIVTDSFYVAESVNKELPYWQSNGFFNNKKKPLKHVSKWKSIADCIQLKPDIIIIHEKGHQPTASTFHTEGNNLADKLATQGSYVVNAGKRTADGSEFEKRTADGSEFESPKKKAKVE

SEQ ID NO: 7584 - protein, 2094 aa, synthetic construct
MPAAKRVKLDGGDKKYSIGLDIGTNSVGWAVITDEYKVPSKKFKVLGNTDRHSIKKNLIGALLFDSGETAEATRLKRTARRRYTRRKNRICYLQEIFSNEMAKVDDSFFHRLEESFLVEEDKKHERHPIFGNIVDEVAYHEKYPTIYHLRKKLVDSTDKADLRLIYLALAHMIKFRGHFLIEGDLNPDNSDVDKLFIQLVQTYNQLFEENPINASGVDAKAILSARLSKSRRLENLIAQLPGEKKNGLFGNLIALSLGLTPNFKSNFDLAEDAKLQLSKDTYDDDLDNLLAQIGDQYADLFLAAKNLSDAILLSDILRVNTEITKAPLSASMIKRYDEHHQDLTLLKALVRQQLPEKYKEIFFDQSKNGYAGYIDGGASQEEFYKFIKPILEKMDGTEELLVKLNREDLLRKQRTFDNGSIPHQIHLGELHAILRRQEDFYPFLKDNREKIEKILTFRIPYYVGPLARGNSRFAWMTRKSEETITPWNFEEVVDKGASAQSFIERMTNFDKNLPNEKVLPKHSLLYEYFTVYNELTKVKYVTEGMRKPAFLSGEQKKAIVDLLFKTNRKVTVKQLKEDYFKKIECFDSVEISGVEDRFNASLGTYHDLLKIIKDKDFLDNEENEDILEDIVLTLTLFEDREMIEERLKTYAHLFDDKVMKQLKRRRYTGWGRLSRKLINGIRDKQSGKTILDFLKSDGFANRNFMQLIHDDSLTFKEDIQKAQVSGQGDSLHEHIANLAGSPAIKKGILQTVKVVDELVKVMGRHKPENIVIEMARENQTTQKGQKNSRERMKRIEEGIKELGSQILKEHPVENTQLQNEKLYLYYLQNGRDMYVDQELDINRLSDYDVDHIVPQSFLKDDSIDNKVLTRSDKARGKSDNVPSEEVVKKMKNYWRQLLNAKLITQRKFDNLTKAERGGLSELDKAGFIKRQLVETRQITKHVAQILDSRMNTKYDENDKLIREVKVITLKSKLVSDFRKDFQFYKVREINNYHHAHDAYLNAVVGTALIKKYPKLESEFVYGDYKVYDVRKMIAKSEQEIGKATAKYFFYSNIMNFFKTEITLANGEIRKRPLIETNGETGEIVWDKGRDFATVRKVLSMPQVNIVKKTEVQTGGFSKESILPKRNSDKLIARKKDWDPKKYGGFDSPTVAYSVLVVAKVEKGKSKKLKSVKELLGITIMERSSFEKNPIDFLEAKGYKEVKKDLIIKLPKYSLFELENGRKRMLASAGELQKGNELALPSKYVNFLYLASHYEKLKGSPEDNEQKQLFVEQHKHYLDEIIEQISEFSKRVILADANLDKVLSAYNKHRDKPIREQAENIIHLFTLTNLGAPAAFKYFDTTIDRKRYTSTKEVLDATLIHQSITGLYETRIDLSQLGGDGGGSSEAAAKPAPGGVLNLEEEYRLHEKPVPSSIDPSWLQLFPTVWAERAGMGLANQVPPVVVELRSGASPVAVRQYPMSKEAREGIRPHIQRFLDLGVLVPCQSPWNTPLLPVKKPGTNDYRPVQDLREINKRVQDIHPTVPNPYNLLSSLPPSHTWYSVLDLKDAFFCLKLHPNSQPLFAFEWRDPEKGNTGQLTWTRLPQGFKNSPTLFDEALHRDLAPFRALNPQVVLLQYVDDLLVAAPTYRDCKEGTQKLLQELSKLGYRVSAKKAQLCQKEVTYLGYLLKEGKRWLTPARKATVMKIPPPTTPRQVREFLGTAGFCRLWIPGFASLAAPLYPLTKESIPFIWTEEHQKAFDRIKEALLSAPALALPDLTKPFTLYVDERAGVARGVLTQTLGPWRRPVAYLSKKLDPVASGWPTCLKAVAAVALLLKDADKLTLGQNVTVIASHSLESIVRQPPDRWMTNARMTHYQSLLLNERVSFAPPAVLNPATLLPVESEATPVHRCSEILAEETGTRRDLKDQPLPGVPAWYTDGSSFIAEGKRRAGAAIVDGKRTVWASSLPEGTSAQKAELVALTQALRLAEGKDINIYTDSRYAFATAHIHGAIYKQRGLLTSAGKDIKNKEEILALLEAIHLPKRVAIIHCPGHQKGNDPVATGNRRADEAAKQAALSTRVLAETTKPAGKRTADGSEFEKRTADGSEFESPKKKAKVE

SEQ ID NO: 7585 - protein, 2094 aa, synthetic construct
MPAAKRVKLDGGDKKYSIGLDIGTNSVGWAVITDEYKVPSKKFKVLGNTDRHSIKKNLIGALLFDSGETAEATRLKRTARRRYTRRKNRICYLQEIFSNEMAKVDDSFFHRLEESFLVEEDKKHERHPIFGNIVDEVAYHEKYPTIYHLRKKLVDSTDKADLRLIYLALAHMIKFRGHFLIEGDLNPDNSDVDKLFIQLVQTYNQLFEENPINASGVDAKAILSARLSKSRRLENLIAQLPGEKKNGLFGNLIALSLGLTPNFKSNFDLAEDAKLQLSKDTYDDDLDNLLAQIGDQYADLFLAAKNLSDAILLSDILRVNTEITKAPLSASMIKRYDEHHQDLTLLKALVRQQLPEKYKEIFFDQSKNGYAGYIDGGASQEEFYKFIKPILEKMDGTEELLVKLNREDLLRKQRTFDNGSIPHQIHLGELHAILRRQEDFYPFLKDNREKIEKILTFRIPYYVGPLARGNSRFAWMTRKSEETITPWNFEEVVDKGASAQSFIERMTNFDKNLPNEKVLPKHSLLYEYFTVYNELTKVKYVTEGMRKPAFLSGEQKKAIVDLLFKTNRKVTVKQLKEDYFKKIECFDSVEISGVEDRFNASLGTYHDLLKIIKDKDFLDNEENEDILEDIVLTLTLFEDREMIEERLKTYAHLFDDKVMKQLKRRRYTGWGRLSRKLINGIRDKQSGKTILDFLKSDGFANRNFMQLIHDDSLTFKEDIQKAQVSGQGDSLHEHIANLAGSPAIKKGILQTVKVVDELVKVMGRHKPENIVIEMARENQTTQKGQKNSRERMKRIEEGIKELGSQILKEHPVENTQLQNEKLYLYYLQNGRDMYVDQELDINRLSDYDVDHIVPQSFLKDDSIDNKVLTRSDKARGKSDNVPSEEVVKKMKNYWRQLLNAKLITQRKFDNLTKAERGGLSELDKAGFIKRQLVETRQITKHVAQILDSRMNTKYDENDKLIREVKVITLKSKLVSDFRKDFQFYKVREINNYHHAHDAYLNAVVGTALIKKYPKLESEFVYGDYKVYDVRKMIAKSEQEIGKATAKYFFYSNIMNFFKTEITLANGEIRKRPLIETNGETGEIVWDKGRDFATVRKVLSMPQVNIVKKTEVQTGGFSKESILPKRNSDKLIARKKDWDPKKYGGFDSPTVAYSVLVVAKVEKGKSKKLKSVKELLGITIMERSSFEKNPIDFLEAKGYKEVKKDLIIKLPKYSLFELENGRKRMLASAGELQKGNELALPSKYVNFLYLASHYEKLKGSPEDNEQKQLFVEQHKHYLDEIIEQISEFSKRVILADANLDKVLSAYNKHRDKPIREQAENIIHLFTLTNLGAPAAFKYFDTTIDRKRYTSTKEVLDATLIHQSITGLYETRIDLSQLGGDGGGSSEAAAKPAPGGVLNLEEEYRLHEKPVPSSIDPSWLQLFPTVWAERAGMGLANQVPPVVVELRSGASPVAVRQYPMSKEAREGIRPHIQRFLDLGVLVPCQSPWNTPLLPVKKPGTNDYRPVQDLREINKRVQDIHPTVPNPYNLLSSLPPSHTWYSVLDLKDAFFCLKLHPNSQPLFAFEWRDPEKGNTGQLTWTRLPQGFKNSPTLFNEALHRDLAPFRALNPQVVLLQYVDDLLVAAPTYRDCKEGTQKLLQELSKLGYRVSAKKAQLCQKEVTYLGYLLKEGKRWLTPARKATVMKIPPPTTPRQVREFLGTAGFCRLWIPGFASLAAPLYPLTKPSIPFIWTEEHQKAFDRIKEALLSAPALALPDLTKPFTLYVDERAGVARGVLTQTLGPWRRPVAYLSKKLDPVASGWPTCLKAVAAVALLLKDADKLTLGQNVTVIASHSLESIVRQPPDRWMTNARMTHYQSLLLNERVSFAPPAVLNPATLLPVESEATPVHRCSEILAEETGTRRDLKDQPLPGVPAWYTDGSSFIAEGKRRAGAAIVDGKRTVWASSLPEGTSAQKAELVALTQALRLAEGKDINIYTDSRYAFATAHIHGAIYKQRGWLTSAGKDIKNKEEILALLEAIHLPKRVAIIHCPGHQKGNDPVATGNRRADEAAKQAALSTRVLAETTKPAGKRTADGSEFEKRTADGSEFESPKKKAKVE

SEQ ID NO: 7586 - protein, 2094 aa, synthetic construct
MPAAKRVKLDGGDKKYSIGLDIGTNSVGWAVITDEYKVPSKKFKVLGNTDRHSIKKNLIGALLFDSGETAEATRLKRTARRRYTRRKNRICYLQEIFSNEMAKVDDSFFHRLEESFLVEEDKKHERHPIFGNIVDEVAYHEKYPTIYHLRKKLVDSTDKADLRLIYLALAHMIKFRGHFLIEGDLNPDNSDVDKLFIQLVQTYNQLFEENPINASGVDAKAILSARLSKSRRLENLIAQLPGEKKNGLFGNLIALSLGLTPNFKSNFDLAEDAKLQLSKDTYDDDLDNLLAQIGDQYADLFLAAKNLSDAILLSDILRVNTEITKAPLSASMIKRYDEHHQDLTLLKALVRQQLPEKYKEIFFDQSKNGYAGYIDGGASQEEFYKFIKPILEKMDGTEELLVKLNREDLLRKQRTFDNGSIPHQIHLGELHAILRRQEDFYPFLKDNREKIEKILTFRIPYYVGPLARGNSRFAWMTRKSEETITPWNFEEVVDKGASAQSFIERMTNFDKNLPNEKVLPKHSLLYEYFTVYNELTKVKYVTEGMRKPAFLSGEQKKAIVDLLFKTNRKVTVKQLKEDYFKKIECFDSVEISGVEDRFNASLGTYHDLLKIIKDKDFLDNEENEDILEDIVLTLTLFEDREMIEERLKTYAHLFDDKVMKQLKRRRYTGWGRLSRKLINGIRDKQSGKTILDFLKSDGFANRNFMQLIHDDSLTFKEDIQKAQVSGQGDSLHEHIANLAGSPAIKKGILQTVKVVDELVKVMGRHKPENIVIEMARENQTTQKGQKNSRERMKRIEEGIKELGSQILKEHPVENTQLQNEKLYLYYLQNGRDMYVDQELDINRLSDYDVDHIVPQSFLKDDSIDNKVLTRSDKARGKSDNVPSEEVVKKMKNYWRQLLNAKLITQRKFDNLTKAERGGLSELDKAGFIKRQLVETRQITKHVAQILDSRMNTKYDENDKLIREVKVITLKSKLVSDFRKDFQFYKVREINNYHHAHDAYLNAVVGTALIKKYPKLESEFVYGDYKVYDVRKMIAKSEQEIGKATAKYFFYSNIMNFFKTEITLANGEIRKRPLIETNGETGEIVWDKGRDFATVRKVLSMPQVNIVKKTEVQTGGFSKESILPKRNSDKLIARKKDWDPKKYGGFDSPTVAYSVLVVAKVEKGKSKKLKSVKELLGITIMERSSFEKNPIDFLEAKGYKEVKKDLIIKLPKYSLFELENGRKRMLASAGELQKGNELALPSKYVNFLYLASHYEKLKGSPEDNEQKQLFVEQHKHYLDEIIEQISEFSKRVILADANLDKVLSAYNKHRDKPIREQAENIIHLFTLTNLGAPAAFKYFDTTIDRKRYTSTKEVLDATLIHQSITGLYETRIDLSQLGGDGGGSSEAAAKPAPGGVLNLEEEYRLHEKPVPSSIDPSWLQLFPTVWAERAGMGLANQVPPVVVELRSGASPVAVRQYPMSKEAREGIRPHIQRFLDLGVLVPCQSPWNTPLLPVKKPGTNDYRPVQDLREINKRVQDIHPTVPNPYNLLSSLPPSHTWYSVLDLKDAFFCLKLHPNSQPLFAFEWRDPEKGNTGQLTWTRLPQGFKNSPTLFNEALHRDLAPFRALNPQVVLLQYVDDLLVAAPTYRDCKEGTQKLLQELSKLGYRVSAKKAQLCQKEVTYLGYLLKEGKRWLTPARKATVMKIPPPTTPRQVREFLGKAGFCRLFIPGFASLAAPLYPLTKPSIPFIWTEEHQKAFDRIKEALLSAPALALPDLTKPFTLYVDERAGVARGVLTQTLGPWRRPVAYLSKKLDPVASGWPTCLKAVAAVALLLKDADKLTLGQNVTVIASHSLESIVRQPPDRWMTNARMTHYQSLLLNERVSFAPPAVLNPATLLPVESEATPVHRCSEILAEETGTRRDLKDQPLPGVPAWYTDGSSFIAEGKRRAGAAIVDGKRTVWASSLPEGTSAQKAELVALTQALRLAEGKDINIYTDSRYAFATAHIHGAIYKQRGWLTSAGKDIKNKEEILALLEAIHLPKRVAIIHCPGHQKGNDPVATGNRRADEAAKQAALSTRVLAETTKPAGKRTADGSEFEKRTADGSEFESPKKKAKVE

SEQ ID NO: 7587 - protein, 2096 aa, synthetic construct; identical to SEQ ID NO: 4538

SEQ ID NO: 7588 - protein, 2098 aa, synthetic construct; identical to SEQ ID NO: 4539

SEQ ID NO: 7589 - protein, 2173 aa, synthetic construct
MPAAKRVKLDGGDKKYSIGLDIGTNSVGWAVITDEYKVPSKKFKVLGNTDRHSIKKNLIGALLFDSGETAEATRLKRTARRRYTRRKNRICYLQEIFSNEMAKVDDSFFHRLEESFLVEEDKKHERHPIFGNIVDEVAYHEKYPTIYHLRKKLVDSTDKADLRLIYLALAHMIKFRGHFLIEGDLNPDNSDVDKLFIQLVQTYNQLFEENPINASGVDAKAILSARLSKSRRLENLIAQLPGEKKNGLFGNLIALSLGLTPNFKSNFDLAEDAKLQLSKDTYDDDLDNLLAQIGDQYADLFLAAKNLSDAILLSDILRVNTEITKAPLSASMIKRYDEHHQDLTLLKALVRQQLPEKYKEIFFDQSKNGYAGYIDGGASQEEFYKFIKPILEKMDGTEELLVKLNREDLLRKQRTFDNGSIPHQIHLGELHAILRRQEDFYPFLKDNREKIEKILTFRIPYYVGPLARGNSRFAWMTRKSEETITPWNFEEVVDKGASAQSFIERMTNFDKNLPNEKVLPKHSLLYEYFTVYNELTKVKYVTEGMRKPAFLSGEQKKAIVDLLFKTNRKVTVKQLKEDYFKKIECFDSVEISGVEDRFNASLGTYHDLLKIIKDKDFLDNEENEDILEDIVLTLTLFEDREMIEERLKTYAHLFDDKVMKQLKRRRYTGWGRLSRKLINGIRDKQSGKTILDFLKSDGFANRNFMQLIHDDSLTFKEDIQKAQVSGQGDSLHEHIANLAGSPAIKKGILQTVKVVDELVKVMGRHKPENIVIEMARENQTTQKGQKNSRERMKRIEEGIKELGSQILKEHPVENTQLQNEKLYLYYLQNGRDMYVDQELDINRLSDYDVDHIVPQSFLKDDSIDNKVLTRSDKARGKSDNVPSEEVVKKMKNYWRQLLNAKLITQRKFDNLTKAERGGLSELDKAGFIKRQLVETRQITKHVAQILDSRMNTKYDENDKLIREVKVITLKSKLVSDFRKDFQFYKVREINNYHHAHDAYLNAVVGTALIKKYPKLESEFVYGDYKVYDVRKMIAKSEQEIGKATAKYFFYSNIMNFFKTEITLANGEIRKRPLIETNGETGEIVWDKGRDFATVRKVLSMPQVNIVKKTEVQTGGFSKESILPKRNSDKLIARKKDWDPKKYGGFDSPTVAYSVLVVAKVEKGKSKKLKSVKELLGITIMERSSFEKNPIDFLEAKGYKEVKKDLIIKLPKYSLFELENGRKRMLASAGELQKGNELALPSKYVNFLYLASHYEKLKGSPEDNEQKQLFVEQHKHYLDEIIEQISEFSKRVILADANLDKVLSAYNKHRDKPIREQAENIIHLFTLTNLGAPAAFKYFDTTIDRKRYTSTKEVLDATLIHQSITGLYETRIDLSQLGGDGGGSSPAPEAAAKGGMDLLKPLTVERKGVKIKGYWNSQADITCVPKDLLQGEEPVRQQNVTTIHGTQEGDVYYVNLKIDGRRINTEVIGTTLDYAIITPGDVPWILKKPLELTIKLDLEEQQGTLLNNSILSKKGKEELKQLFEKYSALWQSWENQVGHRRIRPHKIATGTVKPTPQKQYHINPKAKPDIQIVINDLLKQGVLIQKESTMNTPVYPVPKPNGRWRMVLDYRAVNKVTPLIAVQNQHSYGILGSLFKGRYKTTIDLSNGFWAHPIVPEDYWITAFTWQGKQYCWTVLPQGFLNSPGLFTGDVVDLLQGIPNVEVYVDDVYISHDSEKEHLEYLDILFNRLKEAGYIISLKKSNIANSIVDFLGFQITNEGRGLTDTFKEKLENITAPTTLKQLQSILGLLNFARNFIPDFTELIAPLYALIPKSTKNYVPWQIEHSTTLETLITKLNGAEYLQGRKGDKTLIMKVNASYTTGYIRYYNEGEKKPISYVSIVFSKTELKFTELEKLLTTVHKGLLKALDLSMGQNIHVYSPIVSMQNIQKTPQTAKKALASRWLSWLSYLEDPRIRFFYDPQMPALKDLPAVDTGKDNKKHPSNFQHIFYTDGSAITSPTKEGHLNAGMGIVYFINKDGNLQKQQEWSISLGNHTAQFAEIAAFEFALKKCLPLGGNILVVTDSNYVAKAYNEELDVWASNGFVNNRKKPLKHISKWKSVADLKRLRPDVVVTHEPGHQKLDSSPHAYGNNLADQLATQASFKVHAGKRTADGSEFEKRTADGSEFESPKKKAKVE

SEQ ID NO: 7590 - protein, 2127 aa, synthetic construct
MPAAKRVKLDGGDKKYSIGLDIGTNSVGWAVITDEYKVPSKKFKVLGNTDRHSIKKNLIGALLFDSGETAEATRLKRTARRRYTRRKNRICYLQEIFSNEMAKVDDSFFHRLEESFLVEEDKKHERHPIFGNIVDEVAYHEKYPTIYHLRKKLVDSTDKADLRLIYLALAHMIKFRGHFLIEGDLNPDNSDVDKLFIQLVQTYNQLFEENPINASGVDAKAILSARLSKSRRLENLIAQLPGEKKNGLFGNLIALSLGLTPNFKSNFDLAEDAKLQLSKDTYDDDLDNLLAQIGDQYADLFLAAKNLSDAILLSDILRVNTEITKAPLSASMIKRYDEHHQDLTLLKALVRQQLPEKYKEIFFDQSKNGYAGYIDGGASQEEFYKFIKPILEKMDGTEELLVKLNREDLLRKQRTFDNGSIPHQIHLGELHAILRRQEDFYPFLKDNREKIEKILTFRIPYYVGPLARGNSRFAWMTRKSEETITPWNFEEVVDKGASAQSFIERMTNFDKNLPNEKVLPKHSLLYEYFTVYNELTKVKYVTEGMRKPAFLSGEQKKAIVDLLFKTNRKVTVKQLKEDYFKKIECFDSVEISGVEDRFNASLGTYHDLLKIIKDKDFLDNEENEDILEDIVLTLTLFEDREMIEERLKTYAHLFDDKVMKQLKRRRYTGWGRLSRKLINGIRDKQSGKTILDFLKSDGFANRNFMQLIHDDSLTFKEDIQKAQVSGQGDSLHEHIANLAGSPAIKKGILQTVKVVDELVKVMGRHKPENIVIEMARENQTTQKGQKNSRERMKRIEEGIKELGSQILKEHPVENTQLQNEKLYLYYLQNGRDMYVDQELDINRLSDYDVDHIVPQSFLKDDSIDNKVLTRSDKARGKSDNVPSEEVVKKMKNYWRQLLNAKLITQRKFDNLTKAERGGLSELDKAGFIKRQLVETRQITKHVAQILDSRMNTKYDENDKLIREVKVITLKSKLVSDFRKDFQFYKVREINNYHHAHDAYLNAVVGTALIKKYPKLESEFVYGDYKVYDVRKMIAKSEQEIGKATAKYFFYSNIMNFFKTEITLANGEIRKRPLIETNGETGEIVWDKGRDFATVRKVLSMPQVNIVKKTEVQTGGFSKESILPKRNSDKLIARKKDWDPKKYGGFDSPTVAYSVLVVAKVEKGKSKKLKSVKELLGITIMERSSFEKNPIDFLEAKGYKEVKKDLIIKLPKYSLFELENGRKRMLASAGELQKGNELALPSKYVNFLYLASHYEKLKGSPEDNEQKQLFVEQHKHYLDEIIEQISEFSKRVILADANLDKVLSAYNKHRDKPIREQAENIIHLFTLTNLGAPAAFKYFDTTIDRKRYTSTKEVLDATLIHQSITGLYETRIDLSQLGGDGGGSSPAPEAAAKGGLLGRDLLTKLKAQIQFSTEGPQVTWEDRPAMCLVLNLEEEYRLHEKPVPPSIDPSWLQLFPMVWAEKAGMGLANQVPPVVVELKSDASPVAVRQYPMSKEAREGIRPHIQRFLDLGILVPCQSPWNTPLLPVKKPGTNDYRPVQDLREVNKRVQDIHPTVPNPYNLLSSLPPSHTWYSVLDLKDAFFCLKLHPNSQPLFAFEWRDPEKGNTGQLTWTRLPQGFKNSPTLFNEALHRDLASFRALNPQVVMLQYVDDLLVAAPTYRDCKEGTRRLLQELSKLGYRVSAKKAQLCREEVTYLGYLLKGGKRWLTPARKATVMKIPTPTTPRQVREFLGTAGFCRLWIPGFASLAAPLYPLTRPKVPFTWTEAHQEAFGRIKEALLSAPALALPDLTKPFALYVDEKEGVARGVLTQTLGPWRRPVAYLSKKLDPVASGWPTCLKAIAAVALLLKDADKLTLGQNVLVIAPHNLESIVRQPPDRWMTNARMTHYQSLLLNERVSFAPPAILNPATLLPVESDDTPIHICSEILAEETGTRPDLRDQPLPGVPAWYTDGSSFIMDGRRQAGAAIVDNKRTVWASNLPEGTSAQKAELIALTQALRLAEGKSINIYTDSRYAFATAHVHGAIYKQRGWLTSAGKDIKNKEEILALLEAIHLPKRVAIIHCPGHQRGTDPVATGNRKADEAAKQAAQSTRILTETTKNAGKRTADGSEFEKRTADGSEFESPKKKAKVE

SEQ ID NO: 7591 - protein, 2218 aa, synthetic construct
MPAAKRVKLDGGDKKYSIGLDIGTNSVGWAVITDEYKVPSKKFKVLGNTDRHSIKKNLIGALLFDSGETAEATRLKRTARRRYTRRKNRICYLQEIFSNEMAKVDDSFFHRLEESFLVEEDKKHERHPIFGNIVDEVAYHEKYPTIYHLRKKLVDSTDKADLRLIYLALAHMIKFRGHFLIEGDLNPDNSDVDKLFIQLVQTYNQLFEENPINASGVDAKAILSARLSKSRRLENLIAQLPGEKKNGLFGNLIALSLGLTPNFKSNFDLAEDAKLQLSKDTYDDDLDNLLAQIGDQYADLFLAAKNLSDAILLSDILRVNTEITKAPLSASMIKRYDEHHQDLTLLKALVRQQLPEKYKEIFFDQSKNGYAGYIDGGASQEEFYKFIKPILEKMDGTEELLVKLNREDLLRKQRTFDNGSIPHQIHLGELHAILRRQEDFYPFLKDNREKIEKILTFRIPYYVGPLARGNSRFAWMTRKSEETITPWNFEEVVDKGASAQSFIERMTNFDKNLPNEKVLPKHSLLYEYFTVYNELTKVKYVTEGMRKPAFLSGEQKKAIVDLLFKTNRKVTVKQLKEDYFKKIECFDSVEISGVEDRFNASLGTYHDLLKIIKDKDFLDNEENEDILEDIVLTLTLFEDREMIEERLKTYAHLFDDKVMKQLKRRRYTGWGRLSRKLINGIRDKQSGKTILDFLKSDGFANRNFMQLIHDDSLTFKEDIQKAQVSGQGDSLHEHIANLAGSPAIKKGILQTVKVVDELVKVMGRHKPENIVIEMARENQTTQKGQKNSRERMKRIEEGIKELGSQILKEHPVENTQLQNEKLYLYYLQNGRDMYVDQELDINRLSDYDVDHIVPQSFLKDDSIDNKVLTRSDKARGKSDNVPSEEVVKKMKNYWRQLLNAKLITQRKFDNLTKAERGGLSELDKAGFIKRQLVETRQITKHVAQILDSRMNTKYDENDKLIREVKVITLKSKLVSDFRKDFQFYKVREINNYHHAHDAYLNAVVGTALIKKYPKLESEFVYGDYKVYDVRKMIAKSEQEIGKATAKYFFYSNIMNFFKTEITLANGEIRKRPLIETNGETGEIVWDKGRDFATVRKVLSMPQVNIVKKTEVQTGGFSKESILPKRNSDKLIARKKDWDPKKYGGFDSPTVAYSVLVVAKVEKGKSKKLKSVKELLGITIMERSSFEKNPIDFLEAKGYKEVKKDLIIKLPKYSLFELENGRKRMLASAGELQKGNELALPSKYVNFLYLASHYEKLKGSPEDNEQKQLFVEQHKHYLDEIIEQISEFSKRVILADANLDKVLSAYNKHRDKPIREQAENIIHLFTLTNLGAPAAFKYFDTTIDRKRYTSTKEVLDATLIHQSITGLYETRIDLSQLGGDGGGSSPAPEAAAKGGTLGDQGSRGSDPLPEPRVTLTVEGIPTEFLVNTGAEHSVLTKPMGKMGSKRTVVAGATGSKVYPWTTKRLLKIGQKQVTHSFLVIPECPAPLLGRDLLTKLKAQIQFSTEGPQVTWEDRPAMCLVLNLEEEYRLHEKPVPPSIDPSWLQLFPMVWAEKAGMGLANQVPPVVVELKSDASPVAVRQYPMSKEAREGIRPHIQRFLDLGILVPCQSPWNTPLLPVKKPGTNDYRPVQDLREVNKRVQDIHPTVPNPYNLLSSLPPSHTWYSVLDLKDAFFCLKLHPNSQPLFAFEWRDPEKGNTGQLTWTRLPQGFKNSPTLFNEALHRDLASFRALNPQVVMLQYVDDLLVAAPTYRDCKEGTRRLLQELSKLGYRVSAKKAQLCREEVTYLGYLLKGGKRWLTPARKATVMKIPTPTTPRQVREFLGTAGFCRLWIPGFASLAAPLYPLTRPKVPFTWTEAHQEAFGRIKEALLSAPALALPDLTKPFALYVDEKEGVARGVLTQTLGPWRRPVAYLSKKLDPVASGWPTCLKAIAAVALLLKDADKLTLGQNVLVIAPHNLESIVRQPPDRWMTNARMTHYQSLLLNERVSFAPPAILNPATLLPVESDDTPIHICSEILAEETGTRPDLRDQPLPGVPAWYTDGSSFIMDGRRQAGAAIVDNKRTVWASNLPEGTSAQKAELIALTQALRLAEGKSINIYTDSRYAFATAHVHGAIYKQRGWLTSAGKDIKNKEEILALLEAIHLPKRVAIIHCPGHQRGTDPVATGNRKADEAAKQAAQSTRILTETTKNAGKRTADGSEFEKRTADGSEFESPKKKAKVE

SEQ ID NO: 7592 - protein, 2096 aa, synthetic construct
MPAAKRVKLDGGDKKYSIGLDIGTNSVGWAVITDEYKVPSKKFKVLGNTDRHSIKKNLIGALLFDSGETAEATRLKRTARRRYTRRKNRICYLQEIFSNEMAKVDDSFFHRLEESFLVEEDKKHERHPIFGNIVDEVAYHEKYPTIYHLRKKLVDSTDKADLRLIYLALAHMIKFRGHFLIEGDLNPDNSDVDKLFIQLVQTYNQLFEENPINASGVDAKAILSARLSKSRRLENLIAQLPGEKKNGLFGNLIALSLGLTPNFKSNFDLAEDAKLQLSKDTYDDDLDNLLAQIGDQYADLFLAAKNLSDAILLSDILRVNTEITKAPLSASMIKRYDEHHQDLTLLKALVRQQLPEKYKEIFFDQSKNGYAGYIDGGASQEEFYKFIKPILEKMDGTEELLVKLNREDLLRKQRTFDNGSIPHQIHLGELHAILRRQEDFYPFLKDNREKIEKILTFRIPYYVGPLARGNSRFAWMTRKSEETITPWNFEEVVDKGASAQSFIERMTNFDKNLPNEKVLPKHSLLYEYFTVYNELTKVKYVTEGMRKPAFLSGEQKKAIVDLLFKTNRKVTVKQLKEDYFKKIECFDSVEISGVEDRFNASLGTYHDLLKIIKDKDFLDNEENEDILEDIVLTLTLFEDREMIEERLKTYAHLFDDKVMKQLKRRRYTGWGRLSRKLINGIRDKQSGKTILDFLKSDGFANRNFMQLIHDDSLTFKEDIQKAQVSGQGDSLHEHIANLAGSPAIKKGILQTVKVVDELVKVMGRHKPENIVIEMARENQTTQKGQKNSRERMKRIEEGIKELGSQILKEHPVENTQLQNEKLYLYYLQNGRDMYVDQELDINRLSDYDVDHIVPQSFLKDDSIDNKVLTRSDKARGKSDNVPSEEVVKKMKNYWRQLLNAKLITQRKFDNLTKAERGGLSELDKAGFIKRQLVETRQITKHVAQILDSRMNTKYDENDKLIREVKVITLKSKLVSDFRKDFQFYKVREINNYHHAHDAYLNAVVGTALIKKYPKLESEFVYGDYKVYDVRKMIAKSEQEIGKATAKYFFYSNIMNFFKTEITLANGEIRKRPLIETNGETGEIVWDKGRDFATVRKVLSMPQVNIVKKTEVQTGGFSKESILPKRNSDKLIARKKDWDPKKYGGFDSPTVAYSVLVVAKVEKGKSKKLKSVKELLGITIMERSSFEKNPIDFLEAKGYKEVKKDLIIKLPKYSLFELENGRKRMLASAGELQKGNELALPSKYVNFLYLASHYEKLKGSPEDNEQKQLFVEQHKHYLDEIIEQISEFSKRVILADANLDKVLSAYNKHRDKPIREQAENIIHLFTLTNLGAPAAFKYFDTTIDRKRYTSTKEVLDATLIHQSITGLYETRIDLSQLGGDGGGSSPAPEAAAKGGTLGIEDEYRLHETSTEPDVSLGSTWLSDFPQAWAETGGMGLAVRQAPLIIPLKATSTPVSIQQYPMSHEARLGIKPHIQRLLDQGILVPCQSPWNTPLLPVKKPGTNDYRPVQDLREVNKRVEDIHPTVPNPYNLLSGLPPSHQWYTVLDLKDAFFCLRLHPTSQPLFAFEWRDPGMGISGQLTWTRLPQGFKNSPTLFNEALHRDLADFRIQHPDLILLQYVDDILLAATSELDCQQGTRALLQTLGDLGYRASAKKAQICQKQVKYLGYLLREGQRWLTEARKETVMGQPVPKTPRQLREFLGTAGFCRLWIPGFAEMAAPLYPLTKPGTLFSWGPDQQKAYQEIKQALLTAPALGLPDLTKPFELFVDEKQGYAKGVLTQKLGPWRRPVAYLSKKLDPVAAGWPPCLRMVAAIAVLTKDAGKLTMGQPLVILAPHAVEALVKQPPDRWLSNARMTHYQAMLLDTDRVQFGPVVALNPATLLPLPEEGAPHDCLEILAETHGTRPDLTDQPIPDADHTWYTDGSSFLQEGQRKAGAAVTTETEVIWAGALPAGTSAQRAELIALTQALKMAEGKRLNVYTDSRYAFATAHIHGEIYRRRGWLTSEGREIKNKSEILALLKALFLPKRLSIIHCLGHQKGDSAEARGNRLADQAAREAAIKTPPDTSTLLAGKRTADGSEFEKRTADGSEFESPKKKAKVE

SEQ ID NO: 7593 - protein, 2096 aa, synthetic construct
MPAAKRVKLDGGDKKYSIGLDIGTNSVGWAVITDEYKVPSKKFKVLGNTDRHSIKKNLIGALLFDSGETAEATRLKRTARRRYTRRKNRICYLQEIFSNEMAKVDDSFFHRLEESFLVEEDKKHERHPIFGNIVDEVAYHEKYPTIYHLRKKLVDSTDKADLRLIYLALAHMIKFRGHFLIEGDLNPDNSDVDKLFIQLVQTYNQLFEENPINASGVDAKAILSARLSKSRRLENLIAQLPGEKKNGLFGNLIALSLGLTPNFKSNFDLAEDAKLQLSKDTYDDDLDNLLAQIGDQYADLFLAAKNLSDAILLSDILRVNTEITKAPLSASMIKRYDEHHQDLTLLKALVRQQLPEKYKEIFFDQSKNGYAGYIDGGASQEEFYKFIKPILEKMDGTEELLVKLNREDLLRKQRTFDNGSIPHQIHLGELHAILRRQEDFYPFLKDNREKIEKILTFRIPYYVGPLARGNSRFAWMTRKSEETITPWNFEEVVDKGASAQSFIERMTNFDKNLPNEKVLPKHSLLYEYFTVYNELTKVKYVTEGMRKPAFLSGEQKKAIVDLLFKTNRKVTVKQLKEDYFKKIECFDSVEISGVEDRFNASLGTYHDLLKIIKDKDFLDNEENEDILEDIVLTLTLFEDREMIEERLKTYAHLFDDKVMKQLKRRRYTGWGRLSRKLINGIRDKQSGKTILDFLKSDGFANRNFMQLIHDDSLTFKEDIQKAQVSGQGDSLHEHIANLAGSPAIKKGILQTVKVVDELVKVMGRHKPENIVIEMARENQTTQKGQKNSRERMKRIEEGIKELGSQILKEHPVENTQLQNEKLYLYYLQNGRDMYVDQELDINRLSDYDVDHIVPQSFLKDDSIDNKVLTRSDKARGKSDNVPSEEVVKKMKNYWRQLLNAKLITQRKFDNLTKAERGGLSELDKAGFIKRQLVETRQITKHVAQILDSRMNTKYDENDKLIREVKVITLKSKLVSDFRKDFQFYKVREINNYHHAHDAYLNAVVGTALIKKYPKLESEFVYGDYKVYDVRKMIAKSEQEIGKATAKYFFYSNIMNFFKTEITLANGEIRKRPLIETNGETGEIVWDKGRDFATVRKVLSMPQVNIVKKTEVQTGGFSKESILPKRNSDKLIARKKDWDPKKYGGFDSPTVAYSVLVVAKVEKGKSKKLKSVKELLGITIMERSSFEKNPIDFLEAKGYKEVKKDLIIKLPKYSLFELENGRKRMLASAGELQKGNELALPSKYVNFLYLASHYEKLKGSPEDNEQKQLFVEQHKHYLDEIIEQISEFSKRVILADANLDKVLSAYNKHRDKPIREQAENIIHLFTLTNLGAPAAFKYFDTTIDRKRYTSTKEVLDATLIHQSITGLYETRIDLSQLGGDGGGSSPAPEAAAKGGTLNIEDEHRLHETSKEPDVSLGSTWLSDFPQAWAETGGMGLAVRQAPLIIPLKATSTPVSIKQYPMSQEARLGIKPHIQRLLDQGILVPCQSPWNTPLLPVKKPGTNDYRPVQDLREVNKRVEDIHPTVPNPYNLLSGLPPSHQWYTVLDLKDAFFCLRLHPTSQPLFAFEWRDPEMGISGQLTWTRLPQGFKNSPTLFDEALHRDLADFRIQHPDLILLQYVDDLLLAATSELDCQQGTRALLQTLGNLGYRASAKKAQICQKQVKYLGYLLKEGQRWLTEARKETVMGQPTPKTPRQLREFLGTAGFCRLWIPGFAEMAAPLYPLTKTGTLFNWGPDQQKAYQEIKQALLTAPALGLPDLTKPFELFVDEKQGYAKGVLTQKLGPWRRPVAYLSKKLDPVAAGWPPCLRMVAAIAVLTKDAGKLTMGQPLVILAPHAVEALVKQPPDRWLSNARMTHYQALLLDTDRVQFGPVVALNPATLLPLPEEGLQHNCLDILAEAHGTRPDLTDQPLPDADHTWYTDGSSLLQEGQRKAGAAVTTETEVIWAKALPAGTSAQRAELIALTQALKMAEGKKLNVYTDSRYAFATAHIHGEIYRRRGLLTSEGKEIKNKDEILALLKALFLPKRLSIIHCPGHQKGHSAEARGNRMADQAARKAAITETPDTSTLLAGKRTADGSEFEKRTADGSEFESPKKKAKVE

SEQ ID NO: 7594 - protein, 2096 aa, synthetic construct; identical to SEQ ID NO: 7593

SEQ ID NO: 7595 - protein, 2096 aa, synthetic construct
MPAAKRVKLDGGDKKYSIGLDIGTNSVGWAVITDEYKVPSKKFKVLGNTDRHSIKKNLIGALLFDSGETAEATRLKRTARRRYTRRKNRICYLQEIFSNEMAKVDDSFFHRLEESFLVEEDKKHERHPIFGNIVDEVAYHEKYPTIYHLRKKLVDSTDKADLRLIYLALAHMIKFRGHFLIEGDLNPDNSDVDKLFIQLVQTYNQLFEENPINASGVDAKAILSARLSKSRRLENLIAQLPGEKKNGLFGNLIALSLGLTPNFKSNFDLAEDAKLQLSKDTYDDDLDNLLAQIGDQYADLFLAAKNLSDAILLSDILRVNTEITKAPLSASMIKRYDEHHQDLTLLKALVRQQLPEKYKEIFFDQSKNGYAGYIDGGASQEEFYKFIKPILEKMDGTEELLVKLNREDLLRKQRTFDNGSIPHQIHLGELHAILRRQEDFYPFLKDNREKIEKILTFRIPYYVGPLARGNSRFAWMTRKSEETITPWNFEEVVDKGASAQSFIERMTNFDKNLPNEKVLPKHSLLYEYFTVYNELTKVKYVTEGMRKPAFLSGEQKKAIVDLLFKTNRKVTVKQLKEDYFKKIECFDSVEISGVEDRFNASLGTYHDLLKIIKDKDFLDNEENEDILEDIVLTLTLFEDREMIEERLKTYAHLFDDKVMKQLKRRRYTGWGRLSRKLINGIRDKQSGKTILDFLKSDGFANRNFMQLIHDDSLTFKEDIQKAQVSGQGDSLHEHIANLAGSPAIKKGILQTVKVVDELVKVMGRHKPENIVIEMARENQTTQKGQKNSRERMKRIEEGIKELGSQILKEHPVENTQLQNEKLYLYYLQNGRDMYVDQELDINRLSDYDVDHIVPQSFLKDDSIDNKVLTRSDKARGKSDNVPSEEVVKKMKNYWRQLLNAKLITQRKFDNLTKAERGGLSELDKAGFIKRQLVETRQITKHVAQILDSRMNTKYDENDKLIREVKVITLKSKLVSDFRKDFQFYKVREINNYHHAHDAYLNAVVGTALIKKYPKLESEFVYGDYKVYDVRKMIAKSEQEIGKATAKYFFYSNIMNFFKTEITLANGEIRKRPLIETNGETGEIVWDKGRDFATVRKVLSMPQVNIVKKTEVQTGGFSKESILPKRNSDKLIARKKDWDPKKYGGFDSPTVAYSVLVVAKVEKGKSKKLKSVKELLGITIMERSSFEKNPIDFLEAKGYKEVKKDLIIKLPKYSLFELENGRKRMLASAGELQKGNELALPSKYVNFLYLASHYEKLKGSPEDNEQKQLFVEQHKHYLDEIIEQISEFSKRVILADANLDKVLSAYNKHRDKPIREQAENIIHLFTLTNLGAPAAFKYFDTTIDRKRYTSTKEVLDATLIHQSITGLYETRIDLSQLGGDGGGSSPAPEAAAKGGTLNIEDEYRLHEISTEPDVSPGSTWLSDFPQAWAETGGMGLAVRQAPLIIPLKATSTPVSIKQYPMSQEAKLGIKPHIQRLLDQGILVPCQSPWNTPLLPVKKPGTNDYRPVQGLREVNKRVEDIHPTVPNPYNLLSGLPTSHRWYTVLDLKDAFFCLRLHPTSQPLFASEWRDPGMGISGQLTWTRLPQGFKNSPTLFNEALHRGLADFRIQHPDLILLQYVDDLLLAATSELDCQQGTRALLKTLGNLGYRASAKKAQICQKQVKYLGYLLREGQRWLTEARKETVMGQPTPKTPRQLREFLGTAGFCRLWIPRFAEMAAPLYPLTKPGTLFNWGPDQQKAYHEIKQALLTAPALGLPDLTKPFELFVDEKQGYAKGVLTQKLGPWRRPVAYLSKKLDPVAAGWPPCLRMVAAIAVLTKDAGKLTMGQPLVILAPHAVEALVKQPPDRWLSNARMTHYQAMLLDTDRVQFGPVVALNPATLLPLPEEGAPHDCLEILAETHGTEPDLTDQPIPDADHTWYTDGSSFLQEGQRKAGAAVTTETEVIWARALPAGTSAQRAELIALTQALKMAEGKRLNVYTDSRYAFATAHIHGEIYKRRGWLTSEGREIKNKSEILALLKALFLPKRLSIIHCLGHQKGDSAEARGNRLADQAAREAAIKTPPDTSTLLAGKRTADGSEFEKRTADGSEFESPKKKAKVE

SEQ ID NO: 7596 - protein, 2090 aa, synthetic construct
MPAAKRVKLDGGDKKYSIGLDIGTNSVGWAVITDEYKVPSKKFKVLGNTDRHSIKKNLIGALLFDSGETAEATRLKRTARRRYTRRKNRICYLQEIFSNEMAKVDDSFFHRLEESFLVEEDKKHERHPIFGNIVDEVAYHEKYPTIYHLRKKLVDSTDKADLRLIYLALAHMIKFRGHFLIEGDLNPDNSDVDKLFIQLVQTYNQLFEENPINASGVDAKAILSARLSKSRRLENLIAQLPGEKKNGLFGNLIALSLGLTPNFKSNFDLAEDAKLQLSKDTYDDDLDNLLAQIGDQYADLFLAAKNLSDAILLSDILRVNTEITKAPLSASMIKRYDEHHQDLTLLKALVRQQLPEKYKEIFFDQSKNGYAGYIDGGASQEEFYKFIKPILEKMDGTEELLVKLNREDLLRKQRTFDNGSIPHQIHLGELHAILRRQEDFYPFLKDNREKIEKILTFRIPYYVGPLARGNSRFAWMTRKSEETITPWNFEEVVDKGASAQSFIERMTNFDKNLPNEKVLPKHSLLYEYFTVYNELTKVKYVTEGMRKPAFLSGEQKKAIVDLLFKTNRKVTVKQLKEDYFKKIECFDSVEISGVEDRFNASLGTYHDLLKIIKDKDFLDNEENEDILEDIVLTLTLFEDREMIEERLKTYAHLFDDKVMKQLKRRRYTGWGRLSRKLINGIRDKQSGKTILDFLKSDGFANRNFMQLIHDDSLTFKEDIQKAQVSGQGDSLHEHIANLAGSPAIKKGILQTVKVVDELVKVMGRHKPENIVIEMARENQTTQKGQKNSRERMKRIEEGIKELGSQILKEHPVENTQLQNEKLYLYYLQNGRDMYVDQELDINRLSDYDVDHIVPQSFLKDDSIDNKVLTRSDKARGKSDNVPSEEVVKKMKNYWRQLLNAKLITQRKFDNLTKAERGGLSELDKAGFIKRQLVETRQITKHVAQILDSRMNTKYDENDKLIREVKVITLKSKLVSDFRKDFQFYKVREINNYHHAHDAYLNAVVGTALIKKYPKLESEFVYGDYKVYDVRKMIAKSEQEIGKATAKYFFYSNIMNFFKTEITLANGEIRKRPLIETNGETGEIVWDKGRDFATVRKVLSMPQVNIVKKTEVQTGGFSKESILPKRNSDKLIARKKDWDPKKYGGFDSPTVAYSVLVVAKVEKGKSKKLKSVKELLGITIMERSSFEKNPIDFLEAKGYKEVKKDLIIKLPKYSLFELENGRKRMLASAGELQKGNELALPSKYVNFLYLASHYEKLKGSPEDNEQKQLFVEQHKHYLDEIIEQISEFSKRVILADANLDKVLSAYNKHRDKPIREQAENIIHLFTLTNLGAPAAFKYFDTTIDRKRYTSTKEVLDATLIHQSITGLYETRIDLSQLGGDGGGSSPAPEAAAKGGTLQLDDEYRLYSPLVKPDQNIQFWLEQFPQAWAETAGMGLAKQVPPQVIQLKASATPVSVRQYPLSKEAQEGIRPHVQRLIQQGILVPVQSPWNTPLLPVRKPGTNDYRPVQDLREVNKRVQDIHPTVPNPYNLLCALPPQRSWYTVLDLKDAFFCLRLHPTSQPLFAFEWRDPGTGRTGQLTWTRLPQGFKNSPTIFDEALHRDLANFRIQHPQVTLLQYVDDLLLAGATKQDCLEGTKALLLELSDLGYRASAKKAQICRREVTYLGYSLRDGQRWLTEARKKTVVQIPAPTTAKQVREFLGTAGFCRLWIPGFATLAAPLYPLTKEKGEFSWAPEHQKAFDAIKKALLSAPALALPDVTKPFTLYVDERKGVARGVLTQTLGPWRRPVAYLSKKLDPVASGWPVCLKAIAAVAILVKDADKLTLGQNITVIAPHALENIVRQPPDRWMTNARMTHYQSLLLTERVTFAPPAALNPATLLPEETDEPVTHDCHQLLIEETGVRKDLTDIPLTGEVLTWFTDGSSYVVEGKRMAGAAVVDGTRTIWASSLPEGTSAQKAELMALTQALRLAEGKSINIYTDSRYAFATAHVHGAIYKQRGLLTSAGREIKNKEEILSLLEALHLPKRLAIIHCPGHQKAKDPISRGNQMADRVAKQAAQGVNLLAGKRTADGSEFEKRTADGSEFESPKKKAKVE

SEQ ID NO: 7597 - protein, 2090 aa, synthetic construct; identical to SEQ ID NO: 7596

SEQ ID NO: 7598 - protein, 2176 aa, synthetic construct
MPAAKRVKLDGGDKKYSIGLDIGTNSVGWAVITDEYKVPSKKFKVLGNTDRHSIKKNLIGALLFDSGETAEATRLKRTARRRYTRRKNRICYLQEIFSNEMAKVDDSFFHRLEESFLVEEDKKHERHPIFGNIVDEVAYHEKYPTIYHLRKKLVDSTDKADLRLIYLALAHMIKFRGHFLIEGDLNPDNSDVDKLFIQLVQTYNQLFEENPINASGVDAKAILSARLSKSRRLENLIAQLPGEKKNGLFGNLIALSLGLTPNFKSNFDLAEDAKLQLSKDTYDDDLDNLLAQIGDQYADLFLAAKNLSDAILLSDILRVNTEITKAPLSASMIKRYDEHHQDLTLLKALVRQQLPEKYKEIFFDQSKNGYAGYIDGGASQEEFYKFIKPILEKMDGTEELLVKLNREDLLRKQRTFDNGSIPHQIHLGELHAILRRQEDFYPFLKDNREKIEKILTFRIPYYVGPLARGNSRFAWMTRKSEETITPWNFEEVVDKGASAQSFIERMTNFDKNLPNEKVLPKHSLLYEYFTVYNELTKVKYVTEGMRKPAFLSGEQKKAIVDLLFKTNRKVTVKQLKEDYFKKIECFDSVEISGVEDRFNASLGTYHDLLKIIKDKDFLDNEENEDILEDIVLTLTLFEDREMIEERLKTYAHLFDDKVMKQLKRRRYTGWGRLSRKLINGIRDKQSGKTILDFLKSDGFANRNFMQLIHDDSLTFKEDIQKAQVSGQGDSLHEHIANLAGSPAIKKGILQTVKVVDELVKVMGRHKPENIVIEMARENQTTQKGQKNSRERMKRIEEGIKELGSQILKEHPVENTQLQNEKLYLYYLQNGRDMYVDQELDINRLSDYDVDHIVPQSFLKDDSIDNKVLTRSDKARGKSDNVPSEEVVKKMKNYWRQLLNAKLITQRKFDNLTKAERGGLSELDKAGFIKRQLVETRQITKHVAQILDSRMNTKYDENDKLIREVKVITLKSKLVSDFRKDFQFYKVREINNYHHAHDAYLNAVVGTALIKKYPKLESEFVYGDYKVYDVRKMIAKSEQEIGKATAKYFFYSNIMNFFKTEITLANGEIRKRPLIETNGETGEIVWDKGRDFATVRKVLSMPQVNIVKKTEVQTGGFSKESILPKRNSDKLIARKKDWDPKKYGGFDSPTVAYSVLVVAKVEKGKSKKLKSVKELLGITIMERSSFEKNPIDFLEAKGYKEVKKDLIIKLPKYSLFELENGRKRMLASAGELQKGNELALPSKYVNFLYLASHYEKLKGSPEDNEQKQLFVEQHKHYLDEIIEQISEFSKRVILADANLDKVLSAYNKHRDKPIREQAENIIHLFTLTNLGAPAAFKYFDTTIDRKRYTSTKEVLDATLIHQSITGLYETRIDLSQLGGDGGGSSPAPEAAAKGGMDPLQLLQPLEAEIKGTKLKAHWNSGATITCVPEAFLEDERPIQTMLIKTIHGEKQQDVYYLTFKVQGRKVEAEVLASPYDYILLNPSDVPWLMKKPLQLTVLVPLHEYQERLLQQTALPKEQKELLQKLFLKYDALWQHWENQVGHRRIKPHNIATGTLAPRPQKQYPINPKAKPSIQIVIDDLLKQGVLIQQNSTMNTPVYPVPKPDGKWRMVLDYREVNKTIPLIAAQNQHSAGILSSIYRGKYKTTLDLTNGFWAHPITPESYWLTAFTWQGKQYCWTRLPQGFLNSPALFTADVVDLLKEIPNVQAYVDDIYISHDDPQEHLEQLEKIFSILLNAGYVVSLKKSEIAQREVEFLGFNITKEGRGLTDTFKQKLLNITPPKDLKQLQSILGLLNFARNFIPNYSELVKPLYTIVANANGKFISWTEDNSNQLQHIISVLNQADNLEERNPETRLIIKVNSSPSAGYIRYYNEGSKRPIMYVNYIFSKAEAKFTQTEKLLTTMHKGLIKAMDLAMGQEILVYSPIVSMTKIQRTPLPERKALPVRWITWMTYLEDPRIQFHYDKSLPELQQIPNVTEDVIAKTKHPSEFAMVFYTDGSAIKHPDVNKSHSAGMGIAQVQFIPEYKIVHQWSIPLGDHTAQLAEIAAVEFACKKALKISGPVLIVTDSFYVAESANKELPYWKSNGFLNNKKKPLRHVSKWKSIAECLQLKPDIIIMHEKGHQQPMTTLHTEGNNLADKLATQGSYVVHAGKRTADGSEFEKRTADGSEFESPKKKAKVE

SEQ ID NO: 7599 - protein, 2087 aa, synthetic construct
MPAAKRVKLDGGDKKYSIGLDIGTNSVGWAVITDEYKVPSKKFKVLGNTDRHSIKKNLIGALLFDSGETAEATRLKRTARRRYTRRKNRICYLQEIFSNEMAKVDDSFFHRLEESFLVEEDKKHERHPIFGNIVDEVAYHEKYPTIYHLRKKLVDSTDKADLRLIYLALAHMIKFRGHFLIEGDLNPDNSDVDKLFIQLVQTYNQLFEENPINASGVDAKAILSARLSKSRRLENLIAQLPGEKKNGLFGNLIALSLGLTPNFKSNFDLAEDAKLQLSKDTYDDDLDNLLAQIGDQYADLFLAAKNLSDAILLSDILRVNTEITKAPLSASMIKRYDEHHQDLTLLKALVRQQLPEKYKEIFFDQSKNGYAGYIDGGASQEEFYKFIKPILEKMDGTEELLVKLNREDLLRKQRTFDNGSIPHQIHLGELHAILRRQEDFYPFLKDNREKIEKILTFRIPYYVGPLARGNSRFAWMTRKSEETITPWNFEEVVDKGASAQSFIERMTNFDKNLPNEKVLPKHSLLYEYFTVYNELTKVKYVTEGMRKPAFLSGEQKKAIVDLLFKTNRKVTVKQLKEDYFKKIECFDSVEISGVEDRFNASLGTYHDLLKIIKDKDFLDNEENEDILEDIVLTLTLFEDREMIEERLKTYAHLFDDKVMKQLKRRRYTGWGRLSRKLINGIRDKQSGKTILDFLKSDGFANRNFMQLIHDDSLTFKEDIQKAQVSGQGDSLHEHIANLAGSPAIKKGILQTVKVVDELVKVMGRHKPENIVIEMARENQTTQKGQKNSRERMKRIEEGIKELGSQILKEHPVENTQLQNEKLYLYYLQNGRDMYVDQELDINRLSDYDVDHIVPQSFLKDDSIDNKVLTRSDKARGKSDNVPSEEVVKKMKNYWRQLLNAKLITQRKFDNLTKAERGGLSELDKAGFIKRQLVETRQITKHVAQILDSRMNTKYDENDKLIREVKVITLKSKLVSDFRKDFQFYKVREINNYHHAHDAYLNAVVGTALIKKYPKLESEFVYGDYKVYDVRKMIAKSEQEIGKATAKYFFYSNIMNFFKTEITLANGEIRKRPLIETNGETGEIVWDKGRDFATVRKVLSMPQVNIVKKTEVQTGGFSKESILPKRNSDKLIARKKDWDPKKYGGFDSPTVAYSVLVVAKVEKGKSKKLKSVKELLGITIMERSSFEKNPIDFLEAKGYKEVKKDLIIKLPKYSLFELENGRKRMLASAGELQKGNELALPSKYVNFLYLASHYEKLKGSPEDNEQKQLFVEQHKHYLDEIIEQISEFSKRVILADANLDKVLSAYNKHRDKPIREQAENIIHLFTLTNLGAPAAFKYFDTTIDRKRYTSTKEVLDATLIHQSITGLYETRIDLSQLGGDGGGSSPAPEAAAKGGIPWLMKKPLQLTTLVPLQEYEERLLKQTMLTGSYKEKLQSLFLKYDALWQHWENQVGHRRIKPHHIATGTVNPRPQKQYPINPKAKASIQTVINDLLKQGVLIQQNSIMNTPVYPVPKPDGKWRMVLDYREVNKTIPLIAAQNQHSAGILSSIFRGKYKTTLDLSNGFWAHSITPESYWLTAFTWLGQQYCWTRLPQGFLNSPALFNADVVDLLKEVPNVQVYVDDIYISHDDPREHLEQLEKVFSLLLNAGYVVSLKKSEIAQHEVEFLGFNITKEGRGLTETFKQKLLNITPPRDLKQLQSILGKLNFARNFIPNFSELVKPLYNIIATAPGKYITWTTDNSQQLQNIISMLNSAENLEERNPEVRLIMKVNTSPSAGYIRFYNEFAKRPIMYLNYVYTKAEVKFTNTEKLLTTIHKGLIKALDLGMGQEILVYSPIVSMTKIQKTPLPERKALPIRWITWMSYLEDPRIQFHYDKTLPELQQVPTVTDDIIAKIKHPSEFSMVFYTDGSAIKHPNVNKSHNAGMGIAQVQFKPEFTVINTWSIPLGDHTAQLAEVAAVEFACKKALKIDGPVLIVTDSFYVAESVNKELPYWQSNGFFNNKKKPLKHVSKWKSIADCIQLKPDIIIIHEKGHQPTASTFHTEGNNLADKLATQGSYVVNAGKRTADGSEFEKRTADGSEFESPKKKAKVE

SEQ ID NO: 7600 - protein, 2096 aa, synthetic construct
MPAAKRVKLDGGDKKYSIGLDIGTNSVGWAVITDEYKVPSKKFKVLGNTDRHSIKKNLIGALLFDSGETAEATRLKRTARRRYTRRKNRICYLQEIFSNEMAKVDDSFFHRLEESFLVEEDKKHERHPIFGNIVDEVAYHEKYPTIYHLRKKLVDSTDKADLRLIYLALAHMIKFRGHFLIEGDLNPDNSDVDKLFIQLVQTYNQLFEENPINASGVDAKAILSARLSKSRRLENLIAQLPGEKKNGLFGNLIALSLGLTPNFKSNFDLAEDAKLQLSKDTYDDDLDNLLAQIGDQYADLFLAAKNLSDAILLSDILRVNTEITKAPLSASMIKRYDEHHQDLTLLKALVRQQLPEKYKEIFFDQSKNGYAGYIDGGASQEEFYKFIKPILEKMDGTEELLVKLNREDLLRKQRTFDNGSIPHQIHLGELHAILRRQEDFYPFLKDNREKIEKILTFRIPYYVGPLARGNSRFAWMTRKSEETITPWNFEEVVDKGASAQSFIERMTNFDKNLPNEKVLPKHSLLYEYFTVYNELTKVKYVTEGMRKPAFLSGEQKKAIVDLLFKTNRKVTVKQLKEDYFKKIECFDSVEISGVEDRFNASLGTYHDLLKIIKDKDFLDNEENEDILEDIVLTLTLFEDREMIEERLKTYAHLFDDKVMKQLKRRRYTGWGRLSRKLINGIRDKQSGKTILDFLKSDGFANRNFMQLIHDDSLTFKEDIQKAQVSGQGDSLHEHIANLAGSPAIKKGILQTVKVVDELVKVMGRHKPENIVIEMARENQTTQKGQKNSRERMKRIEEGIKELGSQILKEHPVENTQLQNEKLYLYYLQNGRDMYVDQELDINRLSDYDVDHIVPQSFLKDDSIDNKVLTRSDKARGKSDNVPSEEVVKKMKNYWRQLLNAKLITQRKFDNLTKAERGGLSELDKAGFIKRQLVETRQITKHVAQILDSRMNTKYDENDKLIREVKVITLKSKLVSDFRKDFQFYKVREINNYHHAHDAYLNAVVGTALIKKYPKLESEFVYGDYKVYDVRKMIAKSEQEIGKATAKYFFYSNIMNFFKTEITLANGEIRKRPLIETNGETGEIVWDKGRDFATVRKVLSMPQVNIVKKTEVQTGGFSKESILPKRNSDKLIARKKDWDPKKYGGFDSPTVAYSVLVVAKVEKGKSKKLKSVKELLGITIMERSSFEKNPIDFLEAKGYKEVKKDLIIKLPKYSLFELENGRKRMLASAGELQKGNELALPSKYVNFLYLASHYEKLKGSPEDNEQKQLFVEQHKHYLDEIIEQISEFSKRVILADANLDKVLSAYNKHRDKPIREQAENIIHLFTLTNLGAPAAFKYFDTTIDRKRYTSTKEVLDATLIHQSITGLYETRIDLSQLGGDGGGSSPAPEAAAKGGTLNIEDEYRLHETSKEPDVPLGSTWLSDFPQAWAETGGMGLAVRQAPLIIPLKATSTPVSIKQYPMSQEARLGIKPHIQRLLDQGILVPCQSPWNTPLLPVKKPGTNDYRPVQDLREVNKRVEDIHPTVPNPYNLLSGLPPSHQWYTVLDLKDAFFCLRLHPTSQPLFAFEWRDPEMGISGQLTWTRLPQGFKNSPTLFNEALHRDLADFRIQHPDLILLQYVDDLLLAATSEQDCQRGTRALLQTLGNLGYRASAKKAQICQKQVKYLGYLLKEGQRWLTEARKETVMGQPTPKTPRQLREFLGTAGFCRLWIPGFAEMAAPLYPLTKPGTLFNWGPDQQKAYQEIKQALLTAPALGLPDLTKPFELFVDEKQGYAKGVLTQKLGPWRRPVAYLSKKLDPVAAGWPPCLRMVAAIAVLTKDAGKLTMGQPLVILAPHAVEALVKQPPDRWLSNARMTHYQAMLLDTDRVQFGPVVALNPATLLPLPEKEAPHDCLEILAETHGTRPDLTDQPIPDADYTWYTDGSSFLQEGQRRAGAAVTTETEVIWARALPAGTSAQRAELIALTQALKMAEGKKLNVYTDSRYAFATAHVHGEIYRRRGWLTSEGREIKNKNEILALLKALFLPKRLSIIHCPGHQKGNSAEARGNRMADQAAREAAMKAVLETSTLLAGKRTADGSEFEKRTADGSEFESPKKKAKVE

SEQ ID NO: 7601 - protein, 2087 aa, synthetic construct
MPAAKRVKLDGGDKKYSIGLDIGTNSVGWAVITDEYKVPSKKFKVLGNTDRHSIKKNLIGALLFDSGETAEATRLKRTARRRYTRRKNRICYLQEIFSNEMAKVDDSFFHRLEESFLVEEDKKHERHPIFGNIVDEVAYHEKYPTIYHLRKKLVDSTDKADLRLIYLALAHMIKFRGHFLIEGDLNPDNSDVDKLFIQLVQTYNQLFEENPINASGVDAKAILSARLSKSRRLENLIAQLPGEKKNGLFGNLIALSLGLTPNFKSNFDLAEDAKLQLSKDTYDDDLDNLLAQIGDQYADLFLAAKNLSDAILLSDILRVNTEITKAPLSASMIKRYDEHHQDLTLLKALVRQQLPEKYKEIFFDQSKNGYAGYIDGGASQEEFYKFIKPILEKMDGTEELLVKLNREDLLRKQRTFDNGSIPHQIHLGELHAILRRQEDFYPFLKDNREKIEKILTFRIPYYVGPLARGNSRFAWMTRKSEETITPWNFEEVVDKGASAQSFIERMTNFDKNLPNEKVLPKHSLLYEYFTVYNELTKVKYVTEGMRKPAFLSGEQKKAIVDLLFKTNRKVTVKQLKEDYFKKIECFDSVEISGVEDRFNASLGTYHDLLKIIKDKDFLDNEENEDILEDIVLTLTLFEDREMIEERLKTYAHLFDDKVMKQLKRRRYTGWGRLSRKLINGIRDKQSGKTILDFLKSDGFANRNFMQLIHDDSLTFKEDIQKAQVSGQGDSLHEHIANLAGSPAIKKGILQTVKVVDELVKVMGRHKPENIVIEMARENQTTQKGQKNSRERMKRIEEGIKELGSQILKEHPVENTQLQNEKLYLYYLQNGRDMYVDQELDINRLSDYDVDHIVPQSFLKDDSIDNKVLTRSDKARGKSDNVPSEEVVKKMKNYWRQLLNAKLITQRKFDNLTKAERGGLSELDKAGFIKRQLVETRQITKHVAQILDSRMNTKYDENDKLIREVKVITLKSKLVSDFRKDFQFYKVREINNYHHAHDAYLNAVVGTALIKKYPKLESEFVYGDYKVYDVRKMIAKSEQEIGKATAKYFFYSNIMNFFKTEITLANGEIRKRPLIETNGETGEIVWDKGRDFATVRKVLSMPQVNIVKKTEVQTGGFSKESILPKRNSDKLIARKKDWDPKKYGGFDSPTVAYSVLVVAKVEKGKSKKLKSVKELLGITIMERSSFEKNPIDFLEAKGYKEVKKDLIIKLPKYSLFELENGRKRMLASAGELQKGNELALPSKYVNFLYLASHYEKLKGSPEDNEQKQLFVEQHKHYLDEIIEQISEFSKRVILADANLDKVLSAYNKHRDKPIREQAENIIHLFTLTNLGAPAAFKYFDTTIDRKRYTSTKEVLDATLIHQSITGLYETRIDLSQLGGDGGEAAAKGSSPAPGGVPWILKKPLELTIKLDLEEQQGTLLNNSILSKKGKEELKQLFEKYSALWQSWENQVGHRRIRPHKIATGTVKPTPQKQYHINPKAKPDIQIVINDLLKQGVLIQKESTMNTPVYPVPKPNGRWRMVLDYRAVNKVTPLIAVQNQHSYGILGSLFKGRYKTTIDLSNGFWAHPIVPEDYWITAFTWQGKQYCWTVLPQGFLNSPGLFTGDVVDLLQGIPNVEVYVDDVYISHDSEKEHLEYLDILFNRLKEAGYIISLKKSNIANSIVDFLGFQITNEGRGLTDTFKEKLENITAPTTLKQLQSILGLLNFARNFIPDFTELIAPLYALIPKSTKNYVPWQIEHSTTLETLITKLNGAEYLQGRKGDKTLIMKVNASYTTGYIRYYNEGEKKPISYVSIVFSKTELKFTELEKLLTTVHKGLLKALDLSMGQNIHVYSPIVSMQNIQKTPQTAKKALASRWLSWLSYLEDPRIRFFYDPQMPALKDLPAVDTGKDNKKHPSNFQHIFYTDGSAITSPTKEGHLNAGMGIVYFINKDGNLQKQQEWSISLGNHTAQFAEIAAFEFALKKCLPLGGNILVVTDSNYVAKAYNEELDVWASNGFVNNRKKPLKHISKWKSVADLKRLRPDVVVTHEPGHQKLDSSPHAYGNNLADQLATQASFKVHAGKRTADGSEFEKRTADGSEFESPKKKAKVE

SEQ ID NO: 7602 - protein, 2087 aa, synthetic construct
MPAAKRVKLDGGDKKYSIGLDIGTNSVGWAVITDEYKVPSKKFKVLGNTDRHSIKKNLIGALLFDSGETAEATRLKRTARRRYTRRKNRICYLQEIFSNEMAKVDDSFFHRLEESFLVEEDKKHERHPIFGNIVDEVAYHEKYPTIYHLRKKLVDSTDKADLRLIYLALAHMIKFRGHFLIEGDLNPDNSDVDKLFIQLVQTYNQLFEENPINASGVDAKAILSARLSKSRRLENLIAQLPGEKKNGLFGNLIALSLGLTPNFKSNFDLAEDAKLQLSKDTYDDDLDNLLAQIGDQYADLFLAAKNLSDAILLSDILRVNTEITKAPLSASMIKRYDEHHQDLTLLKALVRQQLPEKYKEIFFDQSKNGYAGYIDGGASQEEFYKFIKPILEKMDGTEELLVKLNREDLLRKQRTFDNGSIPHQIHLGELHAILRRQEDFYPFLKDNREKIEKILTFRIPYYVGPLARGNSRFAWMTRKSEETITPWNFEEVVDKGASAQSFIERMTNFDKNLPNEKVLPKHSLLYEYFTVYNELTKVKYVTEGMRKPAFLSGEQKKAIVDLLFKTNRKVTVKQLKEDYFKKIECFDSVEISGVEDRFNASLGTYHDLLKIIKDKDFLDNEENEDILEDIVLTLTLFEDREMIEERLKTYAHLFDDKVMKQLKRRRYTGWGRLSRKLINGIRDKQSGKTILDFLKSDGFANRNFMQLIHDDSLTFKEDIQKAQVSGQGDSLHEHIANLAGSPAIKKGILQTVKVVDELVKVMGRHKPENIVIEMARENQTTQKGQKNSRERMKRIEEGIKELGSQILKEHPVENTQLQNEKLYLYYLQNGRDMYVDQELDINRLSDYDVDHIVPQSFLKDDSIDNKVLTRSDKARGKSDNVPSEEVVKKMKNYWRQLLNAKLITQRKFDNLTKAERGGLSELDKAGFIKRQLVETRQITKHVAQILDSRMNTKYDENDKLIREVKVITLKSKLVSDFRKDFQFYKVREINNYHHAHDAYLNAVVGTALIKKYPKLESEFVYGDYKVYDVRKMIAKSEQEIGKATAKYFFYSNIMNFFKTEITLANGEIRKRPLIETNGETGEIVWDKGRDFATVRKVLSMPQVNIVKKTEVQTGGFSKESILPKRNSDKLIARKKDWDPKKYGGFDSPTVAYSVLVVAKVEKGKSKKLKSVKELLGITIMERSSFEKNPIDFLEAKGYKEVKKDLIIKLPKYSLFELENGRKRMLASAGELQKGNELALPSKYVNFLYLASHYEKLKGSPEDNEQKQLFVEQHKHYLDEIIEQISEFSKRVILADANLDKVLSAYNKHRDKPIREQAENIIHLFTLTNLGAPAAFKYFDTTIDRKRYTSTKEVLDATLIHQSITGLYETRIDLSQLGGDGGEAAAKGSSPAPGGVPWLTQQPLQLTILVPLQEYQEKILSKTALPEDQKQQLKTLFVKYDNLWQHWENQVGHRKIRPHNIATGDYPPRPQKQYPINPKAKPSIQIVIDDLLKQGVLTPQNSTMNTPVYPVPKPDGRWRMVLDYREVNKTIPLTAAQNQHSAGILATIVRQKYKTTLDLANGFWAHPITPESYWLTAFTWQGKQYCWTRLPQGFLNSPALFNADVVDLLKEIPNVQVYVDDIYLSHDDPKEHVQQLEKVFQILLQAGYVVSLKKSEIGQKTVEFLGFNITKEGRGLTDTFKTKLLNITPPKDLKQLQSILGKLNFARNFIPNFAELVQPLYNLIAPAKGKYIEWSEENTKQLNMVIEALNTASNLEERLPEQRLVIKVNTSPSAGYVRYYNETGKKPIMYLNYVFSKAELKFSMLEKLLTTMHKALIKAMDLAMGQEILVYSPIVSMTKIQKTPLPERKALPIRWITWMTYLEDPRIQFHYDKTLPELKHIPDVYTSSQSPVKHPSQYEGVFYTDGSAIKSPDPTKSNNAGMGIVHATYKPEYQVLNQWSIPLGNHTAQMAEIAAVEFACKKALKIPGPVLVITDSFYVAESANKELPYWKSNGFVNNKKKPLKHISKWKSIAECLSMKPDITIQHEKGISLQIPVFILKGNALADKLATQGSYVVNAGKRTADGSEFEKRTADGSEFESPKKKAKVE

SEQ ID NO: 7603 - protein, 2218 aa, synthetic construct
MPAAKRVKLDGGDKKYSIGLDIGTNSVGWAVITDEYKVPSKKFKVLGNTDRHSIKKNLIGALLFDSGETAEATRLKRTARRRYTRRKNRICYLQEIFSNEMAKVDDSFFHRLEESFLVEEDKKHERHPIFGNIVDEVAYHEKYPTIYHLRKKLVDSTDKADLRLIYLALAHMIKFRGHFLIEGDLNPDNSDVDKLFIQLVQTYNQLFEENPINASGVDAKAILSARLSKSRRLENLIAQLPGEKKNGLFGNLIALSLGLTPNFKSNFDLAEDAKLQLSKDTYDDDLDNLLAQIGDQYADLFLAAKNLSDAILLSDILRVNTEITKAPLSASMIKRYDEHHQDLTLLKALVRQQLPEKYKEIFFDQSKNGYAGYIDGGASQEEFYKFIKPILEKMDGTEELLVKLNREDLLRKQRTFDNGSIPHQIHLGELHAILRRQEDFYPFLKDNREKIEKILTFRIPYYVGPLARGNSRFAWMTRKSEETITPWNFEEVVDKGASAQSFIERMTNFDKNLPNEKVLPKHSLLYEYFTVYNELTKVKYVTEGMRKPAFLSGEQKKAIVDLLFKTNRKVTVKQLKEDYFKKIECFDSVEISGVEDRFNASLGTYHDLLKIIKDKDFLDNEENEDILEDIVLTLTLFEDREMIEERLKTYAHLFDDKVMKQLKRRRYTGWGRLSRKLINGIRDKQSGKTILDFLKSDGFANRNFMQLIHDDSLTFKEDIQKAQVSGQGDSLHEHIANLAGSPAIKKGILQTVKVVDELVKVMGRHKPENIVIEMARENQTTQKGQKNSRERMKRIEEGIKELGSQILKEHPVENTQLQNEKLYLYYLQNGRDMYVDQELDINRLSDYDVDHIVPQSFLKDDSIDNKVLTRSDKARGKSDNVPSEEVVKKMKNYWRQLLNAKLITQRKFDNLTKAERGGLSELDKAGFIKRQLVETRQITKHVAQILDSRMNTKYDENDKLIREVKVITLKSKLVSDFRKDFQFYKVREINNYHHAHDAYLNAVVGTALIKKYPKLESEFVYGDYKVYDVRKMIAKSEQEIGKATAKYFFYSNIMNFFKTEITLANGEIRKRPLIETNGETGEIVWDKGRDFATVRKVLSMPQVNIVKKTEVQTGGFSKESILPKRNSDKLIARKKDWDPKKYGGFDSPTVAYSVLVVAKVEKGKSKKLKSVKELLGITIMERSSFEKNPIDFLEAKGYKEVKKDLIIKLPKYSLFELENGRKRMLASAGELQKGNELALPSKYVNFLYLASHYEKLKGSPEDNEQKQLFVEQHKHYLDEIIEQISEFSKRVILADANLDKVLSAYNKHRDKPIREQAENIIHLFTLTNLGAPAAFKYFDTTIDRKRYTSTKEVLDATLIHQSITGLYETRIDLSQLGGDGGEAAAKGSSPAPGGTLGDQGSRGSDPLPEPRVTLTVEGIPTEFLVNTGAEHSVLTKPMGKMGSKRTVVAGATGSKVYPWTTKRLLKIGQKQVTHSFLVIPECPAPLLGRDLLTKLKAQIQFSTEGPQVTWEDRPAMCLVLNLEEEYRLHEKPVPPSIDPSWLQLFPMVWAEKAGMGLANQVPPVVVELKSDASPVAVRQYPMSKEAREGIRPHIQRFLDLGILVPCQSPWNTPLLPVKKPGTNDYRPVQDLREVNKRVQDIHPTVPNPYNLLSSLPPSHTWYSVLDLKDAFFCLKLHPNSQPLFAFEWRDPEKGNTGQLTWTRLPQGFKNSPTLFNEALHRDLASFRALNPQVVMLQYVDDLLVAAPTYRDCKEGTRRLLQELSKLGYRVSAKKAQLCREEVTYLGYLLKGGKRWLTPARKATVMKIPTPTTPRQVREFLGTAGFCRLWIPGFASLAAPLYPLTRPKVPFTWTEAHQEAFGRIKEALLSAPALALPDLTKPFALYVDEKEGVARGVLTQTLGPWRRPVAYLSKKLDPVASGWPTCLKAIAAVALLLKDADKLTLGQNVLVIAPHNLESIVRQPPDRWMTNARMTHYQSLLLNERVSFAPPAILNPATLLPVESDDTPIHICSEILAEETGTRPDLRDQPLPGVPAWYTDGSSFIMDGRRQAGAAIVDNKRTVWASNLPEGTSAQKAELIALTQALRLAEGKSINIYTDSRYAFATAHVHGAIYKQRGWLTSAGKDIKNKEEILALLEAIHLPKRVAIIHCPGHQRGTDPVATGNRKADEAAKQAAQSTRILTETTKNAGKRTADGSEFEKRTADGSEFESPKKKAKVE

SEQ ID NO: 7604 - protein, 2096 aa, synthetic construct
MPAAKRVKLDGGDKKYSIGLDIGTNSVGWAVITDEYKVPSKKFKVLGNTDRHSIKKNLIGALLFDSGETAEATRLKRTARRRYTRRKNRICYLQEIFSNEMAKVDDSFFHRLEESFLVEEDKKHERHPIFGNIVDEVAYHEKYPTIYHLRKKLVDSTDKADLRLIYLALAHMIKFRGHFLIEGDLNPDNSDVDKLFIQLVQTYNQLFEENPINASGVDAKAILSARLSKSRRLENLIAQLPGEKKNGLFGNLIALSLGLTPNFKSNFDLAEDAKLQLSKDTYDDDLDNLLAQIGDQYADLFLAAKNLSDAILLSDILRVNTEITKAPLSASMIKRYDEHHQDLTLLKALVRQQLPEKYKEIFFDQSKNGYAGYIDGGASQEEFYKFIKPILEKMDGTEELLVKLNREDLLRKQRTFDNGSIPHQIHLGELHAILRRQEDFYPFLKDNREKIEKILTFRIPYYVGPLARGNSRFAWMTRKSEETITPWNFEEVVDKGASAQSFIERMTNFDKNLPNEKVLPKHSLLYEYFTVYNELTKVKYVTEGMRKPAFLSGEQKKAIVDLLFKTNRKVTVKQLKEDYFKKIECFDSVEISGVEDRFNASLGTYHDLLKIIKDKDFLDNEENEDILEDIVLTLTLFEDREMIEERLKTYAHLFDDKVMKQLKRRRYTGWGRLSRKLINGIRDKQSGKTILDFLKSDGFANRNFMQLIHDDSLTFKEDIQKAQVSGQGDSLHEHIANLAGSPAIKKGILQTVKVVDELVKVMGRHKPENIVIEMARENQTTQKGQKNSRERMKRIEEGIKELGSQILKEHPVENTQLQNEKLYLYYLQNGRDMYVDQELDINRLSDYDVDHIVPQSFLKDDSIDNKVLTRSDKARGKSDNVPSEEVVKKMKNYWRQLLNAKLITQRKFDNLTKAERGGLSELDKAGFIKRQLVETRQITKHVAQILDSRMNTKYDENDKLIREVKVITLKSKLVSDFRKDFQFYKVREINNYHHAHDAYLNAVVGTALIKKYPKLESEFVYGDYKVYDVRKMIAKSEQEIGKATAKYFFYSNIMNFFKTEITLANGEIRKRPLIETNGETGEIVWDKGRDFATVRKVLSMPQVNIVKKTEVQTGGFSKESILPKRNSDKLIARKKDWDPKKYGGFDSPTVAYSVLVVAKVEKGKSKKLKSVKELLGITIMERSSFEKNPIDFLEAKGYKEVKKDLIIKLPKYSLFELENGRKRMLASAGELQKGNELALPSKYVNFLYLASHYEKLKGSPEDNEQKQLFVEQHKHYLDEIIEQISEFSKRVILADANLDKVLSAYNKHRDKPIREQAENIIHLFTLTNLGAPAAFKYFDTTIDRKRYTSTKEVLDATLIHQSITGLYETRIDLSQLGGDGGEAAAKGSSPAPGGTLNLEDEYRLYETSAEPEVSPGSTWLSDFPQAWAETGGMGLAVRQAPLIIPLKATSTPVSIKQYPMSQEAKLGIKPHIQRLLDQGILVPCQSPWNTPLLPVKKPGTNDYRPVQDLREVNKRVEDIHPTVPNPYNLLSGLPPSHRWYTVLDLKDAFFCLRLHPTSQPLFAFEWRDPGMGISGQLTWTRLPQGFKNSPTLFNEALHRDLADFRIQHPDLILLQYVDDILLAATSELDCQQGTRALLLTLGNLGYRASAKKAQLCQKQVKYLGYLLKEGQRWLTEARKETVMGQPTPKTPRQLREFLGTAGFCRLWIPGFAEMAAPLYPLTKPGTLFNWGPDQQKAYQEIKQALLTAPALGLPDLTKPFELFVDEKQGYAKGVLTQKLGPWRRPVAYLSKKLDPVAAGWPPCLRMVAAIAVLRKDAGKLTMGQPLVILAPHAVEALVKQPPDRWLSNARMTHYQAMLLDTDRVQFGPVVALNPATLLPLPEEGAPHDCLEILAETHGTRPDLTDQPIPDADHTWYTDGSSFLQEGQRKAGAAVTTETEVIWARALPAGTSAQRAELIALTQALKMAEGKRLNVYTDSRYAFATAHIHGEIYRRRGWLTSEGREIKNKSEILALLKALFLPKRLSIIHCLGHQKGDSAEARGNRLADQAAREAAIKTPPDTSTLLAGKRTADGSEFEKRTADGSEFESPKKKAKVE

SEQ ID NO: 7605 - protein, 2096 aa, synthetic construct
MPAAKRVKLDGGDKKYSIGLDIGTNSVGWAVITDEYKVPSKKFKVLGNTDRHSIKKNLIGALLFDSGETAEATRLKRTARRRYTRRKNRICYLQEIFSNEMAKVDDSFFHRLEESFLVEEDKKHERHPIFGNIVDEVAYHEKYPTIYHLRKKLVDSTDKADLRLIYLALAHMIKFRGHFLIEGDLNPDNSDVDKLFIQLVQTYNQLFEENPINASGVDAKAILSARLSKSRRLENLIAQLPGEKKNGLFGNLIALSLGLTPNFKSNFDLAEDAKLQLSKDTYDDDLDNLLAQIGDQYADLFLAAKNLSDAILLSDILRVNTEITKAPLSASMIKRYDEHHQDLTLLKALVRQQLPEKYKEIFFDQSKNGYAGYIDGGASQEEFYKFIKPILEKMDGTEELLVKLNREDLLRKQRTFDNGSIPHQIHLGELHAILRRQEDFYPFLKDNREKIEKILTFRIPYYVGPLARGNSRFAWMTRKSEETITPWNFEEVVDKGASAQSFIERMTNFDKNLPNEKVLPKHSLLYEYFTVYNELTKVKYVTEGMRKPAFLSGEQKKAIVDLLFKTNRKVTVKQLKEDYFKKIECFDSVEISGVEDRFNASLGTYHDLLKIIKDKDFLDNEENEDILEDIVLTLTLFEDREMIEERLKTYAHLFDDKVMKQLKRRRYTGWGRLSRKLINGIRDKQSGKTILDFLKSDGFANRNFMQLIHDDSLTFKEDIQKAQVSGQGDSLHEHIANLAGSPAIKKGILQTVKVVDELVKVMGRHKPENIVIEMARENQTTQKGQKNSRERMKRIEEGIKELGSQILKEHPVENTQLQNEKLYLYYLQNGRDMYVDQELDINRLSDYDVDHIVPQSFLKDDSIDNKVLTRSDKARGKSDNVPSEEVVKKMKNYWRQLLNAKLITQRKFDNLTKAERGGLSELDKAGFIKRQLVETRQITKHVAQILDSRMNTKYDENDKLIREVKVITLKSKLVSDFRKDFQFYKVREINNYHHAHDAYLNAVVGTALIKKYPKLESEFVYGDYKVYDVRKMIAKSEQEIGKATAKYFFYSNIMNFFKTEITLANGEIRKRPLIETNGETGEIVWDKGRDFATVRKVLSMPQVNIVKKTEVQTGGFSKESILPKRNSDKLIARKKDWDPKKYGGFDSPTVAYSVLVVAKVEKGKSKKLKSVKELLGITIMERSSFEKNPIDFLEAKGYKEVKKDLIIKLPKYSLFELENGRKRMLASAGELQKGNELALPSKYVNFLYLASHYEKLKGSPEDNEQKQLFVEQHKHYLDEIIEQISEFSKRVILADANLDKVLSAYNKHRDKPIREQAENIIHLFTLTNLGAPAAFKYFDTTIDRKRYTSTKEVLDATLIHQSITGLYETRIDLSQLGGDGGEAAAKGSSPAPGGTLNIEDEYRLHETSKEPDVSLGSTWLSDFPQAWAETGGMGLAVRQAPLIIPLKATSTPVSIKQYPMSQEARLGIKPHIQRLLDQGILVPCQSPWNTPLLPVKKPGTNDYRPVQDLREVNKRVEDIHPTVPNPYNLLSGLPPSHQWYTVLDLKDAFFCLRLHPTSQPLFAFEWRDPEMGISGQLTWTRLPQGFKNSPTLFDEALHRDLAGFRIQHPDLILLQYVDDLLLAATSELDCQQGTRALLQTLGDLGYRASAKKAQICQKQVKYLGYLLKEGQRWLTEARKETVMGQPIPKTPRQLREFLGTAGFCRLWIPGFAEMAAPLYPLTKTGTLFNWGPDQQKAFQEIKQALLTAPALGLPDLTKPFELFVDEKQGYAKGVLTQKLGPWRRPVAYLSKKLDPVAAGWPPCLRMVAAIAVLTKDAGKLTMGQPLVILAPHAVEALVKQPPDRWLSNARMTHYQALLLDTDRVQFGPVVALNPATLLPLPEEGLQHDCLDILAEAHGTRSDLMDQPLPDADHTWYTDGSSFLQEGQRKAGAAVTTETEVIWARALPAGTSAQRAELIALTQALKMAEGKKLNVYTDSRYAFATAHIHGEIYRRRGLLTSEGKEIKNKDEILALLKALFLPKRLSIIHCPGHQKGNSAEARGNRMADQAAREVATRETPETSTLLAGKRTADGSEFEKRTADGSEFESPKKKAKVE

SEQ ID NO: 7606 - protein, 2096 aa, synthetic construct
MPAAKRVKLDGGDKKYSIGLDIGTNSVGWAVITDEYKVPSKKFKVLGNTDRHSIKKNLIGALLFDSGETAEATRLKRTARRRYTRRKNRICYLQEIFSNEMAKVDDSFFHRLEESFLVEEDKKHERHPIFGNIVDEVAYHEKYPTIYHLRKKLVDSTDKADLRLIYLALAHMIKFRGHFLIEGDLNPDNSDVDKLFIQLVQTYNQLFEENPINASGVDAKAILSARLSKSRRLENLIAQLPGEKKNGLFGNLIALSLGLTPNFKSNFDLAEDAKLQLSKDTYDDDLDNLLAQIGDQYADLFLAAKNLSDAILLSDILRVNTEITKAPLSASMIKRYDEHHQDLTLLKALVRQQLPEKYKEIFFDQSKNGYAGYIDGGASQEEFYKFIKPILEKMDGTEELLVKLNREDLLRKQRTFDNGSIPHQIHLGELHAILRRQEDFYPFLKDNREKIEKILTFRIPYYVGPLARGNSRFAWMTRKSEETITPWNFEEVVDKGASAQSFIERMTNFDKNLPNEKVLPKHSLLYEYFTVYNELTKVKYVTEGMRKPAFLSGEQKKAIVDLLFKTNRKVTVKQLKEDYFKKIECFDSVEISGVEDRFNASLGTYHDLLKIIKDKDFLDNEENEDILEDIVLTLTLFEDREMIEERLKTYAHLFDDKVMKQLKRRRYTGWGRLSRKLINGIRDKQSGKTILDFLKSDGFANRNFMQLIHDDSLTFKEDIQKAQVSGQGDSLHEHIANLAGSPAIKKGILQTVKVVDELVKVMGRHKPENIVIEMARENQTTQKGQKNSRERMKRIEEGIKELGSQILKEHPVENTQLQNEKLYLYYLQNGRDMYVDQELDINRLSDYDVDHIVPQSFLKDDSIDNKVLTRSDKARGKSDNVPSEEVVKKMKNYWRQLLNAKLITQRKFDNLTKAERGGLSELDKAGFIKRQLVETRQITKHVAQILDSRMNTKYDENDKLIREVKVITLKSKLVSDFRKDFQFYKVREINNYHHAHDAYLNAVVGTALIKKYPKLESEFVYGDYKVYDVRKMIAKSEQEIGKATAKYFFYSNIMNFFKTEITLANGEIRKRPLIETNGETGEIVWDKGRDFATVRKVLSMPQVNIVKKTEVQTGGFSKESILPKRNSDKLIARKKDWDPKKYGGFDSPTVAYSVLVVAKVEKGKSKKLKSVKELLGITIMERSSFEKNPIDFLEAKGYKEVKKDLIIKLPKYSLFELENGRKRMLASAGELQKGNELALPSKYVNFLYLASHYEKLKGSPEDNEQKQLFVEQHKHYLDEIIEQISEFSKRVILADANLDKVLSAYNKHRDKPIREQAENIIHLFTLTNLGAPAAFKYFDTTIDRKRYTSTKEVLDATLIHQSITGLYETRIDLSQLGGDGGEAAAKGSSPAPGGTLNIEDEYRLHETSKEPDVSLGSTWLSDFPQAWAETGGMGLAVRQAPLIIPLKATSTPVSIKQYPMSQEARLGIKPHIQRLLDQGILVPCQSPWNTPLLPVKKPGTNDYRPVQDLREVNKRVEDIHPTVPNPYNLLSGLPPSHQWYTVLDLKDAFFCLRLHPTSQPLFAFEWRDPEMGISGQLTWTRLPQGFKNSPTLFNEALHRDLAGFRIQHPDLILLQYVDDLLLAATSELDCQQGTRALLQTLGDLGYRASAKKAQICQKQVKYLGYLLKEGQRWLTEARKETVMGQPIPKTPRQLREFLGKAGFCRLFIPGFAEMAAPLYPLTKPGTLFNWGPDQQKAFQEIKQALLTAPALGLPDLTKPFELFVDEKQGYAKGVLTQKLGPWRRPVAYLSKKLDPVAAGWPPCLRMVAAIAVLTKDAGKLTMGQPLVILAPHAVEALVKQPPDRWLSNARMTHYQALLLDTDRVQFGPVVALNPATLLPLPEEGLQHDCLDILAEAHGTRSDLMDQPLPDADHTWYTDGSSFLQEGQRKAGAAVTTETEVIWARALPAGTSAQRAELIALTQALKMAEGKKLNVYTDSRYAFATAHIHGEIYRRRGWLTSEGKEIKNKDEILALLKALFLPKRLSIIHCPGHQKGNSAEARGNRMADQAAREVATRETPETSTLLAGKRTADGSEFEKRTADGSEFESPKKKAKVE

SEQ ID NO: 7607 - protein, 2096 aa, synthetic construct
MPAAKRVKLDGGDKKYSIGLDIGTNSVGWAVITDEYKVPSKKFKVLGNTDRHSIKKNLIGALLFDSGETAEATRLKRTARRRYTRRKNRICYLQEIFSNEMAKVDDSFFHRLEESFLVEEDKKHERHPIFGNIVDEVAYHEKYPTIYHLRKKLVDSTDKADLRLIYLALAHMIKFRGHFLIEGDLNPDNSDVDKLFIQLVQTYNQLFEENPINASGVDAKAILSARLSKSRRLENLIAQLPGEKKNGLFGNLIALSLGLTPNFKSNFDLAEDAKLQLSKDTYDDDLDNLLAQIGDQYADLFLAAKNLSDAILLSDILRVNTEITKAPLSASMIKRYDEHHQDLTLLKALVRQQLPEKYKEIFFDQSKNGYAGYIDGGASQEEFYKFIKPILEKMDGTEELLVKLNREDLLRKQRTFDNGSIPHQIHLGELHAILRRQEDFYPFLKDNREKIEKILTFRIPYYVGPLARGNSRFAWMTRKSEETITPWNFEEVVDKGASAQSFIERMTNFDKNLPNEKVLPKHSLLYEYFTVYNELTKVKYVTEGMRKPAFLSGEQKKAIVDLLFKTNRKVTVKQLKEDYFKKIECFDSVEISGVEDRFNASLGTYHDLLKIIKDKDFLDNEENEDILEDIVLTLTLFEDREMIEERLKTYAHLFDDKVMKQLKRRRYTGWGRLSRKLINGIRDKQSGKTILDFLKSDGFANRNFMQLIHDDSLTFKEDIQKAQVSGQGDSLHEHIANLAGSPAIKKGILQTVKVVDELVKVMGRHKPENIVIEMARENQTTQKGQKNSRERMKRIEEGIKELGSQILKEHPVENTQLQNEKLYLYYLQNGRDMYVDQELDINRLSDYDVDHIVPQSFLKDDSIDNKVLTRSDKARGKSDNVPSEEVVKKMKNYWRQLLNAKLITQRKFDNLTKAERGGLSELDKAGFIKRQLVETRQITKHVAQILDSRMNTKYDENDKLIREVKVITLKSKLVSDFRKDFQFYKVREINNYHHAHDAYLNAVVGTALIKKYPKLESEFVYGDYKVYDVRKMIAKSEQEIGKATAKYFFYSNIMNFFKTEITLANGEIRKRPLIETNGETGEIVWDKGRDFATVRKVLSMPQVNIVKKTEVQTGGFSKESILPKRNSDKLIARKKDWDPKKYGGFDSPTVAYSVLVVAKVEKGKSKKLKSVKELLGITIMERSSFEKNPIDFLEAKGYKEVKKDLIIKLPKYSLFELENGRKRMLASAGELQKGNELALPSKYVNFLYLASHYEKLKGSPEDNEQKQLFVEQHKHYLDEIIEQISEFSKRVILADANLDKVLSAYNKHRDKPIREQAENIIHLFTLTNLGAPAAFKYFDTTIDRKRYTSTKEVLDATLIHQSITGLYETRIDLSQLGGDGGEAAAKGSSPAPGGTLNIEDEHRLHETSKEPDVSLGSTWLSDFPQAWAETGGMGLAVRQAPLIIPLKATSTPVSIKQYPMSQEARLGIKPHIQRLLDQGILVPCQSPWNTPLLPVKKPGTNDYRPVQDLREVNKRVEDIHPTVPNPYNLLSGLPPSHQWYTVLDLKDAFFCLRLHPTSQPLFAFEWRDPEMGISGQLTWTRLPQGFKNSPTLFDEALHRDLADFRIQHPDLILLQYVDDLLLAATSELDCQQGTRALLQTLGNLGYRASAKKAQICQKQVKYLGYLLKEGQRWLTEARKETVMGQPTPKTPRQLREFLGTAGFCRLWIPGFAEMAAPLYPLTKTGTLFNWGPDQQKAYQEIKQALLTAPALGLPDLTKPFELFVDEKQGYAKGVLTQKLGPWRRPVAYLSKKLDPVAAGWPPCLRMVAAIAVLTKDAGKLTMGQPLVILAPHAVEALVKQPPDRWLSNARMTHYQALLLDTDRVQFGPVVALNPATLLPLPEEGLQHNCLDILAEAHGTRPDLTDQPLPDADHTWYTDGSSLLQEGQRKAGAAVTTETEVIWAKALPAGTSAQRAELIALTQALKMAEGKKLNVYTDSRYAFATAHIHGEIYRRRGLLTSEGKEIKNKDEILALLKALFLPKRLSIIHCPGHQKGHSAEARGNRMADQAARKAAITETPDTSTLLAGKRTADGSEFEKRTADGSEFESPKKKAKVE

SEQ ID NO: 7608 - protein, 2024 aa, synthetic construct
MPAAKRVKLDGGDKKYSIGLDIGTNSVGWAVITDEYKVPSKKFKVLGNTDRHSIKKNLIGALLFDSGETAEATRLKRTARRRYTRRKNRICYLQEIFSNEMAKVDDSFFHRLEESFLVEEDKKHERHPIFGNIVDEVAYHEKYPTIYHLRKKLVDSTDKADLRLIYLALAHMIKFRGHFLIEGDLNPDNSDVDKLFIQLVQTYNQLFEENPINASGVDAKAILSARLSKSRRLENLIAQLPGEKKNGLFGNLIALSLGLTPNFKSNFDLAEDAKLQLSKDTYDDDLDNLLAQIGDQYADLFLAAKNLSDAILLSDILRVNTEITKAPLSASMIKRYDEHHQDLTLLKALVRQQLPEKYKEIFFDQSKNGYAGYIDGGASQEEFYKFIKPILEKMDGTEELLVKLNREDLLRKQRTFDNGSIPHQIHLGELHAILRRQEDFYPFLKDNREKIEKILTFRIPYYVGPLARGNSRFAWMTRKSEETITPWNFEEVVDKGASAQSFIERMTNFDKNLPNEKVLPKHSLLYEYFTVYNELTKVKYVTEGMRKPAFLSGEQKKAIVDLLFKTNRKVTVKQLKEDYFKKIECFDSVEISGVEDRFNASLGTYHDLLKIIKDKDFLDNEENEDILEDIVLTLTLFEDREMIEERLKTYAHLFDDKVMKQLKRRRYTGWGRLSRKLINGIRDKQSGKTILDFLKSDGFANRNFMQLIHDDSLTFKEDIQKAQVSGQGDSLHEHIANLAGSPAIKKGILQTVKVVDELVKVMGRHKPENIVIEMARENQTTQKGQKNSRERMKRIEEGIKELGSQILKEHPVENTQLQNEKLYLYYLQNGRDMYVDQELDINRLSDYDVDHIVPQSFLKDDSIDNKVLTRSDKARGKSDNVPSEEVVKKMKNYWRQLLNAKLITQRKFDNLTKAERGGLSELDKAGFIKRQLVETRQITKHVAQILDSRMNTKYDENDKLIREVKVITLKSKLVSDFRKDFQFYKVREINNYHHAHDAYLNAVVGTALIKKYPKLESEFVYGDYKVYDVRKMIAKSEQEIGKATAKYFFYSNIMNFFKTEITLANGEIRKRPLIETNGETGEIVWDKGRDFATVRKVLSMPQVNIVKKTEVQTGGFSKESILPKRNSDKLIARKKDWDPKKYGGFDSPTVAYSVLVVAKVEKGKSKKLKSVKELLGITIMERSSFEKNPIDFLEAKGYKEVKKDLIIKLPKYSLFELENGRKRMLASAGELQKGNELALPSKYVNFLYLASHYEKLKGSPEDNEQKQLFVEQHKHYLDEIIEQISEFSKRVILADANLDKVLSAYNKHRDKPIREQAENIIHLFTLTNLGAPAAFKYFDTTIDRKRYTSTKEVLDATLIHQSITGLYETRIDLSQLGGDGGEAAAKGSSPAPGGGRDIMKDIKVRLMTDSPDDSQDLMIGAIESNLFADQISWKSDQPVWLNQWPLKQEKLQALQQLVTEQLQLGHLEESNSPWNTPVFVIKKKSGKWRLLQDLRAVNATMHDMGALQPGLPSPVAPPKGWEIIIIDLQDCFFNIKLHPEDCKRFAFSVPSPNFKRPYQRFQWKVLPQGMKNSPTLCQKFVDKAILTVRDKYQDSYIVHYMDDILLAHPSRSIVDEILTSMIQALNKHGLVVSTEKIQKYDNLKYLGTHIQGDSVSYQKLQIRTDKLRTLNDFQKLLGNINWIRPFLKLTTGELKPLFEILNPDSNPISTRKLTPEACKALQLMNERLSTARVKRLDLSQPWSLCILKTEYTPTACLWQDGVVEWIHLPHISPKVITPYDIFCTQLIIKGRHRSKELFSKDPDYIVVPYTKVQFDLLLQEKEDWPISLLGFLGEVHFHLPKDPLLTFTLQTAIIFPHMTSTTPLEKGIVIFTDGSANGRSVTYIQGREPIIKENTQNTAQQAEIVAVITAFEEVSQPFNLYTDSKYVTGLFPEIETATLSPRTKIYTELKHLQRLIHKRQEKFYIGHIRGHTGLPGPLAQGNAYADSLTRILTAGKRTADGSEFEKRTADGSEFESPKKKAKVE

SEQ ID NO: 7609 - protein, 2176 aa, synthetic construct
MPAAKRVKLDGGDKKYSIGLDIGTNSVGWAVITDEYKVPSKKFKVLGNTDRHSIKKNLIGALLFDSGETAEATRLKRTARRRYTRRKNRICYLQEIFSNEMAKVDDSFFHRLEESFLVEEDKKHERHPIFGNIVDEVAYHEKYPTIYHLRKKLVDSTDKADLRLIYLALAHMIKFRGHFLIEGDLNPDNSDVDKLFIQLVQTYNQLFEENPINASGVDAKAILSARLSKSRRLENLIAQLPGEKKNGLFGNLIALSLGLTPNFKSNFDLAEDAKLQLSKDTYDDDLDNLLAQIGDQYADLFLAAKNLSDAILLSDILRVNTEITKAPLSASMIKRYDEHHQDLTLLKALVRQQLPEKYKEIFFDQSKNGYAGYIDGGASQEEFYKFIKPILEKMDGTEELLVKLNREDLLRKQRTFDNGSIPHQIHLGELHAILRRQEDFYPFLKDNREKIEKILTFRIPYYVGPLARGNSRFAWMTRKSEETITPWNFEEVVDKGASAQSFIERMTNFDKNLPNEKVLPKHSLLYEYFTVYNELTKVKYVTEGMRKPAFLSGEQKKAIVDLLFKTNRKVTVKQLKEDYFKKIECFDSVEISGVEDRFNASLGTYHDLLKIIKDKDFLDNEENEDILEDIVLTLTLFEDREMIEERLKTYAHLFDDKVMKQLKRRRYTGWGRLSRKLINGIRDKQSGKTILDFLKSDGFANRNFMQLIHDDSLTFKEDIQKAQVSGQGDSLHEHIANLAGSPAIKKGILQTVKVVDELVKVMGRHKPENIVIEMARENQTTQKGQKNSRERMKRIEEGIKELGSQILKEHPVENTQLQNEKLYLYYLQNGRDMYVDQELDINRLSDYDVDHIVPQSFLKDDSIDNKVLTRSDKARGKSDNVPSEEVVKKMKNYWRQLLNAKLITQRKFDNLTKAERGGLSELDKAGFIKRQLVETRQITKHVAQILDSRMNTKYDENDKLIREVKVITLKSKLVSDFRKDFQFYKVREINNYHHAHDAYLNAVVGTALIKKYPKLESEFVYGDYKVYDVRKMIAKSEQEIGKATAKYFFYSNIMNFFKTEITLANGEIRKRPLIETNGETGEIVWDKGRDFATVRKVLSMPQVNIVKKTEVQTGGFSKESILPKRNSDKLIARKKDWDPKKYGGFDSPTVAYSVLVVAKVEKGKSKKLKSVKELLGITIMERSSFEKNPIDFLEAKGYKEVKKDLIIKLPKYSLFELENGRKRMLASAGELQKGNELALPSKYVNFLYLASHYEKLKGSPEDNEQKQLFVEQHKHYLDEIIEQISEFSKRVILADANLDKVLSAYNKHRDKPIREQAENIIHLFTLTNLGAPAAFKYFDTTIDRKRYTSTKEVLDATLIHQSITGLYETRIDLSQLGGDGGEAAAKGSSPAPGGMDPLQLLQPLEAEIKGTKLKAHWNSGATITCVPEAFLEDERPIQTMLIKTIHGEKQQDVYYLTFKVQGRKVEAEVLASPYDYILLNPSDVPWLMKKPLQLTVLVPLHEYQERLLQQTALPKEQKELLQKLFLKYDALWQHWENQVGHRRIKPHNIATGTLAPRPQKQYPINPKAKPSIQIVIDDLLKQGVLIQQNSTMNTPVYPVPKPDGKWRMVLDYREVNKTIPLIAAQNQHSAGILSSIYRGKYKTTLDLTNGFWAHPITPESYWLTAFTWQGKQYCWTRLPQGFLNSPALFNADVVDLLKEIPNVQAYVDDIYISHDDPQEHLEQLEKIFSILLNAGYVVSLKKSEIAQREVEFLGFNITKEGRGLTDTFKQKLLNITPPKDLKQLQSILGKLNFARNFIPNYSELVKPLYTIVAPANGKFISWTEDNSNQLQHIISVLNQADNLEERNPETRLIIKVNSSPSAGYIRYYNEGSKRPIMYVNYIFSKAEAKFTQTEKLLTTMHKGLIKAMDLAMGQEILVYSPIVSMTKIQRTPLPERKALPVRWITWMTYLEDPRIQFHYDKSLPELQQIPNVTEDVIAKTKHPSEFAMVFYTDGSAIKHPDVNKSHSAGMGIAQVQFIPEYKIVHQWSIPLGDHTAQLAEIAAVEFACKKALKISGPVLIVTDSFYVAESANKELPYWKSNGFLNNKKKPLRHVSKWKSIAECLQLKPDIIIMHEKGHQQPMTTLHTEGNNLADKLATQGSYVVHAGKRTADGSEFEKRTADGSEFESPKKKAKVE

SEQ ID NO: 7610 - protein, 2087 aa, synthetic construct
MPAAKRVKLDGGDKKYSIGLDIGTNSVGWAVITDEYKVPSKKFKVLGNTDRHSIKKNLIGALLFDSGETAEATRLKRTARRRYTRRKNRICYLQEIFSNEMAKVDDSFFHRLEESFLVEEDKKHERHPIFGNIVDEVAYHEKYPTIYHLRKKLVDSTDKADLRLIYLALAHMIKFRGHFLIEGDLNPDNSDVDKLFIQLVQTYNQLFEENPINASGVDAKAILSARLSKSRRLENLIAQLPGEKKNGLFGNLIALSLGLTPNFKSNFDLAEDAKLQLSKDTYDDDLDNLLAQIGDQYADLFLAAKNLSDAILLSDILRVNTEITKAPLSASMIKRYDEHHQDLTLLKALVRQQLPEKYKEIFFDQSKNGYAGYIDGGASQEEFYKFIKPILEKMDGTEELLVKLNREDLLRKQRTFDNGSIPHQIHLGELHAILRRQEDFYPFLKDNREKIEKILTFRIPYYVGPLARGNSRFAWMTRKSEETITPWNFEEVVDKGASAQSFIERMTNFDKNLPNEKVLPKHSLLYEYFTVYNELTKVKYVTEGMRKPAFLSGEQKKAIVDLLFKTNRKVTVKQLKEDYFKKIECFDSVEISGVEDRFNASLGTYHDLLKIIKDKDFLDNEENEDILEDIVLTLTLFEDREMIEERLKTYAHLFDDKVMKQLKRRRYTGWGRLSRKLINGIRDKQSGKTILDFLKSDGFANRNFMQLIHDDSLTFKEDIQKAQVSGQGDSLHEHIANLAGSPAIKKGILQTVKVVDELVKVMGRHKPENIVIEMARENQTTQKGQKNSRERMKRIEEGIKELGSQILKEHPVENTQLQNEKLYLYYLQNGRDMYVDQELDINRLSDYDVDHIVPQSFLKDDSIDNKVLTRSDKARGKSDNVPSEEVVKKMKNYWRQLLNAKLITQRKFDNLTKAERGGLSELDKAGFIKRQLVETRQITKHVAQILDSRMNTKYDENDKLIREVKVITLKSKLVSDFRKDFQFYKVREINNYHHAHDAYLNAVVGTALIKKYPKLESEFVYGDYKVYDVRKMIAKSEQEIGKATAKYFFYSNIMNFFKTEITLANGEIRKRPLIETNGETGEIVWDKGRDFATVRKVLSMPQVNIVKKTEVQTGGFSKESILPKRNSDKLIARKKDWDPKKYGGFDSPTVAYSVLVVAKVEKGKSKKLKSVKELLGITIMERSSFEKNPIDFLEAKGYKEVKKDLIIKLPKYSLFELENGRKRMLASAGELQKGNELALPSKYVNFLYLASHYEKLKGSPEDNEQKQLFVEQHKHYLDEIIEQISEFSKRVILADANLDKVLSAYNKHRDKPIREQAENIIHLFTLTNLGAPAAFKYFDTTIDRKRYTSTKEVLDATLIHQSITGLYETRIDLSQLGGDGGEAAAKGSSPAPGGIPWLMKKPLQLTTLVPLQEYEERLLKQTMLTGSYKEKLQSLFLKYDALWQHWENQVGHRRIKPHHIATGTVNPRPQKQYPINPKAKASIQTVINDLLKQGVLIQQNSIMNTPVYPVPKPDGKWRMVLDYREVNKTIPLIAAQNQHSAGILSSIFRGKYKTTLDLSNGFWAHSITPESYWLTAFTWLGQQYCWTRLPQGFLNSPALFNADVVDLLKEVPNVQVYVDDIYISHDDPREHLEQLEKVFSLLLNAGYVVSLKKSEIAQHEVEFLGFNITKEGRGLTETFKQKLLNITPPRDLKQLQSILGKLNFARNFIPNFSELVKPLYNIIATAPGKYITWTTDNSQQLQNIISMLNSAENLEERNPEVRLIMKVNTSPSAGYIRFYNEFAKRPIMYLNYVYTKAEVKFTNTEKLLTTIHKGLIKALDLGMGQEILVYSPIVSMTKIQKTPLPERKALPIRWITWMSYLEDPRIQFHYDKTLPELQQVPTVTDDIIAKIKHPSEFSMVFYTDGSAIKHPNVNKSHNAGMGIAQVQFKPEFTVINTWSIPLGDHTAQLAEVAAVEFACKKALKIDGPVLIVTDSFYVAESVNKELPYWQSNGFFNNKKKPLKHVSKWKSIADCIQLKPDIIIIHEKGHQPTASTFHTEGNNLADKLATQGSYVVNAGKRTADGSEFEKRTADGSEFESPKKKAKVE

SEQ ID NO: 7611 - protein, 2176 aa, synthetic construct
MPAAKRVKLDGGDKKYSIGLDIGTNSVGWAVITDEYKVPSKKFKVLGNTDRHSIKKNLIGALLFDSGETAEATRLKRTARRRYTRRKNRICYLQEIFSNEMAKVDDSFFHRLEESFLVEEDKKHERHPIFGNIVDEVAYHEKYPTIYHLRKKLVDSTDKADLRLIYLALAHMIKFRGHFLIEGDLNPDNSDVDKLFIQLVQTYNQLFEENPINASGVDAKAILSARLSKSRRLENLIAQLPGEKKNGLFGNLIALSLGLTPNFKSNFDLAEDAKLQLSKDTYDDDLDNLLAQIGDQYADLFLAAKNLSDAILLSDILRVNTEITKAPLSASMIKRYDEHHQDLTLLKALVRQQLPEKYKEIFFDQSKNGYAGYIDGGASQEEFYKFIKPILEKMDGTEELLVKLNREDLLRKQRTFDNGSIPHQIHLGELHAILRRQEDFYPFLKDNREKIEKILTFRIPYYVGPLARGNSRFAWMTRKSEETITPWNFEEVVDKGASAQSFIERMTNFDKNLPNEKVLPKHSLLYEYFTVYNELTKVKYVTEGMRKPAFLSGEQKKAIVDLLFKTNRKVTVKQLKEDYFKKIECFDSVEISGVEDRFNASLGTYHDLLKIIKDKDFLDNEENEDILEDIVLTLTLFEDREMIEERLKTYAHLFDDKVMKQLKRRRYTGWGRLSRKLINGIRDKQSGKTILDFLKSDGFANRNFMQLIHDDSLTFKEDIQKAQVSGQGDSLHEHIANLAGSPAIKKGILQTVKVVDELVKVMGRHKPENIVIEMARENQTTQKGQKNSRERMKRIEEGIKELGSQILKEHPVENTQLQNEKLYLYYLQNGRDMYVDQELDINRLSDYDVDHIVPQSFLKDDSIDNKVLTRSDKARGKSDNVPSEEVVKKMKNYWRQLLNAKLITQRKFDNLTKAERGGLSELDKAGFIKRQLVETRQITKHVAQILDSRMNTKYDENDKLIREVKVITLKSKLVSDFRKDFQFYKVREINNYHHAHDAYLNAVVGTALIKKYPKLESEFVYGDYKVYDVRKMIAKSEQEIGKATAKYFFYSNIMNFFKTEITLANGEIRKRPLIETNGETGEIVWDKGRDFATVRKVLSMPQVNIVKKTEVQTGGFSKESILPKRNSDKLIARKKDWDPKKYGGFDSPTVAYSVLVVAKVEKGKSKKLKSVKELLGITIMERSSFEKNPIDFLEAKGYKEVKKDLIIKLPKYSLFELENGRKRMLASAGELQKGNELALPSKYVNFLYLASHYEKLKGSPEDNEQKQLFVEQHKHYLDEIIEQISEFSKRVILADANLDKVLSAYNKHRDKPIREQAENIIHLFTLTNLGAPAAFKYFDTTIDRKRYTSTKEVLDATLIHQSITGLYETRIDLSQLGGDGGEAAAKGSSPAPGGMDPLQLLQPLEAEIKGTKLKAHWNSGATITCVPQAFLEEEVPIKNIWIKTIHGEKEQPVYYLTFKIQGRKVEAEVISSPYDYILVSPSDIPWLMKKPLQLTTLVPLQEYEERLLKQTMLTGSYKEKLQSLFLKYDALWQHWENQVGHRRIKPHHIATGTVNPRPQKQYPINPKAKASIQTVINDLLKQGVLIQQNSIMNTPVYPVPKPDGKWRMVLDYREVNKTIPLIAAQNQHSAGILSSIFRGKYKTTLDLSNGFWAHSITPESYWLTAFTWLGQQYCWTRLPQGFLNSPALFNADVVDLLKEVPNVQVYVDDIYISHDDPREHLEQLEKVFSLLLNAGYVVSLKKSEIAQHEVEFLGFNITKEGRGLTETFKQKLLNITPPRDLKQLQSILGKLNFARNFIPNFSELVKPLYNIIATAPGKYITWTTDNSQQLQNIISMLNSAENLEERNPEVRLIMKVNTSPSAGYIRFYNEFAKRPIMYLNYVYTKAEVKFTNTEKLLTTIHKGLIKALDLGMGQEILVYSPIVSMTKIQKTPLPERKALPIRWITWMSYLEDPRIQFHYDKTLPELQQVPTVTDDIIAKIKHPSEFSMVFYTDGSAIKHPNVNKSHNAGMGIAQVQFKPEFTVINTWSIPLGDHTAQLAEVAAVEFACKKALKIDGPVLIVTDSFYVAESVNKELPYWQSNGFFNNKKKPLKHVSKWKSIADCIQLKPDIIIIHEKGHQPTASTFHTEGNNLADKLATQGSYVVNAGKRTADGSEFEKRTADGSEFESPKKKAKVE

SEQ ID NO: 7612 - protein, 2098 aa, synthetic construct
MPAAKRVKLDGGDKKYSIGLDIGTNSVGWAVITDEYKVPSKKFKVLGNTDRHSIKKNLIGALLFDSGETAEATRLKRTARRRYTRRKNRICYLQEIFSNEMAKVDDSFFHRLEESFLVEEDKKHERHPIFGNIVDEVAYHEKYPTIYHLRKKLVDSTDKADLRLIYLALAHMIKFRGHFLIEGDLNPDNSDVDKLFIQLVQTYNQLFEENPINASGVDAKAILSARLSKSRRLENLIAQLPGEKKNGLFGNLIALSLGLTPNFKSNFDLAEDAKLQLSKDTYDDDLDNLLAQIGDQYADLFLAAKNLSDAILLSDILRVNTEITKAPLSASMIKRYDEHHQDLTLLKALVRQQLPEKYKEIFFDQSKNGYAGYIDGGASQEEFYKFIKPILEKMDGTEELLVKLNREDLLRKQRTFDNGSIPHQIHLGELHAILRRQEDFYPFLKDNREKIEKILTFRIPYYVGPLARGNSRFAWMTRKSEETITPWNFEEVVDKGASAQSFIERMTNFDKNLPNEKVLPKHSLLYEYFTVYNELTKVKYVTEGMRKPAFLSGEQKKAIVDLLFKTNRKVTVKQLKEDYFKKIECFDSVEISGVEDRFNASLGTYHDLLKIIKDKDFLDNEENEDILEDIVLTLTLFEDREMIEERLKTYAHLFDDKVMKQLKRRRYTGWGRLSRKLINGIRDKQSGKTILDFLKSDGFANRNFMQLIHDDSLTFKEDIQKAQVSGQGDSLHEHIANLAGSPAIKKGILQTVKVVDELVKVMGRHKPENIVIEMARENQTTQKGQKNSRERMKRIEEGIKELGSQILKEHPVENTQLQNEKLYLYYLQNGRDMYVDQELDINRLSDYDVDHIVPQSFLKDDSIDNKVLTRSDKARGKSDNVPSEEVVKKMKNYWRQLLNAKLITQRKFDNLTKAERGGLSELDKAGFIKRQLVETRQITKHVAQILDSRMNTKYDENDKLIREVKVITLKSKLVSDFRKDFQFYKVREINNYHHAHDAYLNAVVGTALIKKYPKLESEFVYGDYKVYDVRKMIAKSEQEIGKATAKYFFYSNIMNFFKTEITLANGEIRKRPLIETNGETGEIVWDKGRDFATVRKVLSMPQVNIVKKTEVQTGGFSKESILPKRNSDKLIARKKDWDPKKYGGFDSPTVAYSVLVVAKVEKGKSKKLKSVKELLGITIMERSSFEKNPIDFLEAKGYKEVKKDLIIKLPKYSLFELENGRKRMLASAGELQKGNELALPSKYVNFLYLASHYEKLKGSPEDNEQKQLFVEQHKHYLDEIIEQISEFSKRVILADANLDKVLSAYNKHRDKPIREQAENIIHLFTLTNLGAPAAFKYFDTTIDRKRYTSTKEVLDATLIHQSITGLYETRIDLSQLGGDGGEAAAKPAPGSSGGTAPLEEEYRLFLEAPIQNVTLLEQWKREIPKVWAEINPPGLASTQAPIHVQLLSTALPVRVRQYPITLEAKRSLRETIRKFRAAGILRPVHSPWNTPLLPVRKSGTSEYRMVQDLREVNKRVETIHPTVPNPYTLLSLLPPDRIWYSVLDLKDAFFCIPLAPESQLIFAFEWADAEEGESGQLTWTRLPQGFKNSPTLFNEALNRDLQGFRLDHPSVSLLQYVDDLLIAADTQAACLSATRDLLMTLAELGYRVSGKKAQLCQEEVTYLGFKIHKGSRSLSNSRTQAILQIPVPKTKRQVREFLGKIGYCRLFIPGFAELAQPLYAATRPGNDPLVWGEKEEEAFQSLKLALTQPPALALPSLDKPFQLFVEETSGAAKGVLTQALGPWKRPVAYLSKRLDPVAAGWPRCLRAIAAAALLTREASKLTFGQDIEITSSHNLESLLRSPPDKWLTNARITQYQVLLLDPPRVRFKQTAALNPATLLPETDDTLPIHHCLDTLDSLTSTRPDLTDQPLAQAEATLFTDGSSYIRDGKRYAGAAVVTLDSVIWAEPLPIGTSAQKAELIALTKALEWSKDKSVNIYTDSRYAFATLHVHGMIYRERGWLTAGGKAIKNAPEILALLTAVWLPKRVAVMHCKGHQKDDAPTSTGNRRADEVAREVAIRPLSTQATISAGKRTADGSEFEKRTADGSEFESPKKKAKVE

SEQ ID NO: 7613 - protein, 2102 aa, synthetic construct
MPAAKRVKLDGGDKKYSIGLDIGTNSVGWAVITDEYKVPSKKFKVLGNTDRHSIKKNLIGALLFDSGETAEATRLKRTARRRYTRRKNRICYLQEIFSNEMAKVDDSFFHRLEESFLVEEDKKHERHPIFGNIVDEVAYHEKYPTIYHLRKKLVDSTDKADLRLIYLALAHMIKFRGHFLIEGDLNPDNSDVDKLFIQLVQTYNQLFEENPINASGVDAKAILSARLSKSRRLENLIAQLPGEKKNGLFGNLIALSLGLTPNFKSNFDLAEDAKLQLSKDTYDDDLDNLLAQIGDQYADLFLAAKNLSDAILLSDILRVNTEITKAPLSASMIKRYDEHHQDLTLLKALVRQQLPEKYKEIFFDQSKNGYAGYIDGGASQEEFYKFIKPILEKMDGTEELLVKLNREDLLRKQRTFDNGSIPHQIHLGELHAILRRQEDFYPFLKDNREKIEKILTFRIPYYVGPLARGNSRFAWMTRKSEETITPWNFEEVVDKGASAQSFIERMTNFDKNLPNEKVLPKHSLLYEYFTVYNELTKVKYVTEGMRKPAFLSGEQKKAIVDLLFKTNRKVTVKQLKEDYFKKIECFDSVEISGVEDRFNASLGTYHDLLKIIKDKDFLDNEENEDILEDIVLTLTLFEDREMIEERLKTYAHLFDDKVMKQLKRRRYTGWGRLSRKLINGIRDKQSGKTILDFLKSDGFANRNFMQLIHDDSLTFKEDIQKAQVSGQGDSLHEHIANLAGSPAIKKGILQTVKVVDELVKVMGRHKPENIVIEMARENQTTQKGQKNSRERMKRIEEGIKELGSQILKEHPVENTQLQNEKLYLYYLQNGRDMYVDQELDINRLSDYDVDHIVPQSFLKDDSIDNKVLTRSDKARGKSDNVPSEEVVKKMKNYWRQLLNAKLITQRKFDNLTKAERGGLSELDKAGFIKRQLVETRQITKHVAQILDSRMNTKYDENDKLIREVKVITLKSKLVSDFRKDFQFYKVREINNYHHAHDAYLNAVVGTALIKKYPKLESEFVYGDYKVYDVRKMIAKSEQEIGKATAKYFFYSNIMNFFKTEITLANGEIRKRPLIETNGETGEIVWDKGRDFATVRKVLSMPQVNIVKKTEVQTGGFSKESILPKRNSDKLIARKKDWDPKKYGGFDSPTVAYSVLVVAKVEKGKSKKLKSVKELLGITIMERSSFEKNPIDFLEAKGYKEVKKDLIIKLPKYSLFELENGRKRMLASAGELQKGNELALPSKYVNFLYLASHYEKLKGSPEDNEQKQLFVEQHKHYLDEIIEQISEFSKRVILADANLDKVLSAYNKHRDKPIREQAENIIHLFTLTNLGAPAAFKYFDTTIDRKRYTSTKEVLDATLIHQSITGLYETRIDLSQLGGDGGEAAAKPAPGSSGGTVSLQDEHRLFDIPVTTSLPDVWLQDFPQAWAETGGLGRAKCQAPIIIDLKPTAVPVSIKQYPMSLEAHMGIRQHIIKFLELGVLRPCRSPWNTPLLPVKKPGTQDYRPVQDLREINKRTVDIHPTVPNPYNLLSTLKPDYSWYTVLDLKDAFFCLPLAPQSQELFAFEWKDPERGISGQLTWTRLPQGFKNSPTLFNEALHRDLTDFRTQHPEVTLLQYVDDLLLAAPTKKACTQGTRHLLQELGEKGYRASAKKAQICQTKVTYLGYILSEGKRWLTPGRIETVARIPPPRNPREVREFLGTAGFCRLWIPGFAELAAPLYALTKPSTPFTWQTEHQLAFEALKKALLSAPALGLPDTSKPFTLFLDERQGIAKGVLTQKLGPWKRPVAYLSKKLDPVAAGWPPCLRIMAATAMLVKDSAKLTLGQPLTVITPHTLEAIVRQPPDRWITNARLTHYQALLLDTDRVQFGPPVTLNPATLLPVPENQPSPHDCRQVLAETHGTREDLKDQELPDADHTWYTDGSSYLDSGTRRAGAAVVDGHNTIWAQSLPPGTSAQKAELIALTKALELSKGKKANIYTDSRYAFATAHTHGSIYERRGWLTSEGKEIKNKAEIIALLKALFLPQEVAIIHCPGHQKGQDPVAVGNRQADRVARQAAMAEVLTLATEPDNTSHITAGKRTADGSEFEKRTADGSEFESPKKKAKVE

SEQ ID NO: 7614 - protein, 2173 aa, synthetic construct
MPAAKRVKLDGGDKKYSIGLDIGTNSVGWAVITDEYKVPSKKFKVLGNTDRHSIKKNLIGALLFDSGETAEATRLKRTARRRYTRRKNRICYLQEIFSNEMAKVDDSFFHRLEESFLVEEDKKHERHPIFGNIVDEVAYHEKYPTIYHLRKKLVDSTDKADLRLIYLALAHMIKFRGHFLIEGDLNPDNSDVDKLFIQLVQTYNQLFEENPINASGVDAKAILSARLSKSRRLENLIAQLPGEKKNGLFGNLIALSLGLTPNFKSNFDLAEDAKLQLSKDTYDDDLDNLLAQIGDQYADLFLAAKNLSDAILLSDILRVNTEITKAPLSASMIKRYDEHHQDLTLLKALVRQQLPEKYKEIFFDQSKNGYAGYIDGGASQEEFYKFIKPILEKMDGTEELLVKLNREDLLRKQRTFDNGSIPHQIHLGELHAILRRQEDFYPFLKDNREKIEKILTFRIPYYVGPLARGNSRFAWMTRKSEETITPWNFEEVVDKGASAQSFIERMTNFDKNLPNEKVLPKHSLLYEYFTVYNELTKVKYVTEGMRKPAFLSGEQKKAIVDLLFKTNRKVTVKQLKEDYFKKIECFDSVEISGVEDRFNASLGTYHDLLKIIKDKDFLDNEENEDILEDIVLTLTLFEDREMIEERLKTYAHLFDDKVMKQLKRRRYTGWGRLSRKLINGIRDKQSGKTILDFLKSDGFANRNFMQLIHDDSLTFKEDIQKAQVSGQGDSLHEHIANLAGSPAIKKGILQTVKVVDELVKVMGRHKPENIVIEMARENQTTQKGQKNSRERMKRIEEGIKELGSQILKEHPVENTQLQNEKLYLYYLQNGRDMYVDQELDINRLSDYDVDHIVPQSFLKDDSIDNKVLTRSDKARGKSDNVPSEEVVKKMKNYWRQLLNAKLITQRKFDNLTKAERGGLSELDKAGFIKRQLVETRQITKHVAQILDSRMNTKYDENDKLIREVKVITLKSKLVSDFRKDFQFYKVREINNYHHAHDAYLNAVVGTALIKKYPKLESEFVYGDYKVYDVRKMIAKSEQEIGKATAKYFFYSNIMNFFKTEITLANGEIRKRPLIETNGETGEIVWDKGRDFATVRKVLSMPQVNIVKKTEVQTGGFSKESILPKRNSDKLIARKKDWDPKKYGGFDSPTVAYSVLVVAKVEKGKSKKLKSVKELLGITIMERSSFEKNPIDFLEAKGYKEVKKDLIIKLPKYSLFELENGRKRMLASAGELQKGNELALPSKYVNFLYLASHYEKLKGSPEDNEQKQLFVEQHKHYLDEIIEQISEFSKRVILADANLDKVLSAYNKHRDKPIREQAENIIHLFTLTNLGAPAAFKYFDTTIDRKRYTSTKEVLDATLIHQSITGLYETRIDLSQLGGDGGEAAAKPAPGSSGGMDLLKPLTVERKGVKIKGYWNSQADITCVPKDLLQGEEPVRQQNVTTIHGTQEGDVYYVNLKIDGRRINTEVIGTTLDYAIITPGDVPWILKKPLELTIKLDLEEQQGTLLNNSILSKKGKEELKQLFEKYSALWQSWENQVGHRRIRPHKIATGTVKPTPQKQYHINPKAKPDIQIVINDLLKQGVLIQKESTMNTPVYPVPKPNGRWRMVLDYRAVNKVTPLIAVQNQHSYGILGSLFKGRYKTTIDLSNGFWAHPIVPEDYWITAFTWQGKQYCWTVLPQGFLNSPGLFTGDVVDLLQGIPNVEVYVDDVYISHDSEKEHLEYLDILFNRLKEAGYIISLKKSNIANSIVDFLGFQITNEGRGLTDTFKEKLENITAPTTLKQLQSILGLLNFARNFIPDFTELIAPLYALIPKSTKNYVPWQIEHSTTLETLITKLNGAEYLQGRKGDKTLIMKVNASYTTGYIRYYNEGEKKPISYVSIVFSKTELKFTELEKLLTTVHKGLLKALDLSMGQNIHVYSPIVSMQNIQKTPQTAKKALASRWLSWLSYLEDPRIRFFYDPQMPALKDLPAVDTGKDNKKHPSNFQHIFYTDGSAITSPTKEGHLNAGMGIVYFINKDGNLQKQQEWSISLGNHTAQFAEIAAFEFALKKCLPLGGNILVVTDSNYVAKAYNEELDVWASNGFVNNRKKPLKHISKWKSVADLKRLRPDVVVTHEPGHQKLDSSPHAYGNNLADQLATQASFKVHAGKRTADGSEFEKRTADGSEFESPKKKAKVE

SEQ ID NO: 7615 - protein, 2095 aa, synthetic construct
MPAAKRVKLDGGDKKYSIGLDIGTNSVGWAVITDEYKVPSKKFKVLGNTDRHSIKKNLIGALLFDSGETAEATRLKRTARRRYTRRKNRICYLQEIFSNEMAKVDDSFFHRLEESFLVEEDKKHERHPIFGNIVDEVAYHEKYPTIYHLRKKLVDSTDKADLRLIYLALAHMIKFRGHFLIEGDLNPDNSDVDKLFIQLVQTYNQLFEENPINASGVDAKAILSARLSKSRRLENLIAQLPGEKKNGLFGNLIALSLGLTPNFKSNFDLAEDAKLQLSKDTYDDDLDNLLAQIGDQYADLFLAAKNLSDAILLSDILRVNTEITKAPLSASMIKRYDEHHQDLTLLKALVRQQLPEKYKEIFFDQSKNGYAGYIDGGASQEEFYKFIKPILEKMDGTEELLVKLNREDLLRKQRTFDNGSIPHQIHLGELHAILRRQEDFYPFLKDNREKIEKILTFRIPYYVGPLARGNSRFAWMTRKSEETITPWNFEEVVDKGASAQSFIERMTNFDKNLPNEKVLPKHSLLYEYFTVYNELTKVKYVTEGMRKPAFLSGEQKKAIVDLLFKTNRKVTVKQLKEDYFKKIECFDSVEISGVEDRFNASLGTYHDLLKIIKDKDFLDNEENEDILEDIVLTLTLFEDREMIEERLKTYAHLFDDKVMKQLKRRRYTGWGRLSRKLINGIRDKQSGKTILDFLKSDGFANRNFMQLIHDDSLTFKEDIQKAQVSGQGDSLHEHIANLAGSPAIKKGILQTVKVVDELVKVMGRHKPENIVIEMARENQTTQKGQKNSRERMKRIEEGIKELGSQILKEHPVENTQLQNEKLYLYYLQNGRDMYVDQELDINRLSDYDVDHIVPQSFLKDDSIDNKVLTRSDKARGKSDNVPSEEVVKKMKNYWRQLLNAKLITQRKFDNLTKAERGGLSELDKAGFIKRQLVETRQITKHVAQILDSRMNTKYDENDKLIREVKVITLKSKLVSDFRKDFQFYKVREINNYHHAHDAYLNAVVGTALIKKYPKLESEFVYGDYKVYDVRKMIAKSEQEIGKATAKYFFYSNIMNFFKTEITLANGEIRKRPLIETNGETGEIVWDKGRDFATVRKVLSMPQVNIVKKTEVQTGGFSKESILPKRNSDKLIARKKDWDPKKYGGFDSPTVAYSVLVVAKVEKGKSKKLKSVKELLGITIMERSSFEKNPIDFLEAKGYKEVKKDLIIKLPKYSLFELENGRKRMLASAGELQKGNELALPSKYVNFLYLASHYEKLKGSPEDNEQKQLFVEQHKHYLDEIIEQISEFSKRVILADANLDKVLSAYNKHRDKPIREQAENIIHLFTLTNLGAPAAFKYFDTTIDRKRYTSTKEVLDATLIHQSITGLYETRIDLSQLGGDGGEAAAKPAPGSSGGTLQLEEEYRLFEPESTQKQEMDIWLKNFPQAWAETGGMGTAHCQAPVLIQLKATATPISIRQYPMPHEAYQGIKPHIRRMLDQGILKPCQSPWNTPLLPVKKPGTEDYRPVQDLREVNKRVEDIHPTVPNPYNLLSTLPPSHPWYTVLDLKDAFFCLRLHSESQLLFAFEWRDPEIGLSGQLTWTRLPQGFKNSPTLFNEALHSDLADFRVRYPALVLLQYVDDLLLAAATRTECLEGTKALLETLGNKGYRASAKKAQICLQEVTYLGYSLKDGQRWLTKARKEAILSIPVPKNSRQVREFLGKAGYCRLFIPGFAELAAPLYPLTRPGTLFQWGTEQQLAFEDIKKALLSSPALGLPDITKPFELFIDENSGFAKGVLVQKLGPWKRPVAYLSKKLDTVASGWPPCLRMVAAIAILVKDAGKLTLGQPLTILTSHPVEALVRQPPNKWLSNARMTHYQAMLLDAERVHFGPTVSLNPATLLPLPSGGNHHDCLQILAETHGTRPDLTDQPLPDADLTWYTDGSSFIRNGEREAGAAVTTESEVIWAAPLPPGTSAQRAELIALTQALKMAEGKKLTVYTDSRYAFATTHVHGEIYRRRGWLTSEGKEIKNKNEILALLEALFLPKRLSIIHCPGHQKGDSPQAKGNRLADDTAKKAATETHSSLTVLPAGKRTADGSEFEKRTADGSEFESPKKKAKVE

SEQ ID NO: 7616 - protein, 2087 aa, synthetic construct
MPAAKRVKLDGGDKKYSIGLDIGTNSVGWAVITDEYKVPSKKFKVLGNTDRHSIKKNLIGALLFDSGETAEATRLKRTARRRYTRRKNRICYLQEIFSNEMAKVDDSFFHRLEESFLVEEDKKHERHPIFGNIVDEVAYHEKYPTIYHLRKKLVDSTDKADLRLIYLALAHMIKFRGHFLIEGDLNPDNSDVDKLFIQLVQTYNQLFEENPINASGVDAKAILSARLSKSRRLENLIAQLPGEKKNGLFGNLIALSLGLTPNFKSNFDLAEDAKLQLSKDTYDDDLDNLLAQIGDQYADLFLAAKNLSDAILLSDILRVNTEITKAPLSASMIKRYDEHHQDLTLLKALVRQQLPEKYKEIFFDQSKNGYAGYIDGGASQEEFYKFIKPILEKMDGTEELLVKLNREDLLRKQRTFDNGSIPHQIHLGELHAILRRQEDFYPFLKDNREKIEKILTFRIPYYVGPLARGNSRFAWMTRKSEETITPWNFEEVVDKGASAQSFIERMTNFDKNLPNEKVLPKHSLLYEYFTVYNELTKVKYVTEGMRKPAFLSGEQKKAIVDLLFKTNRKVTVKQLKEDYFKKIECFDSVEISGVEDRFNASLGTYHDLLKIIKDKDFLDNEENEDILEDIVLTLTLFEDREMIEERLKTYAHLFDDKVMKQLKRRRYTGWGRLSRKLINGIRDKQSGKTILDFLKSDGFANRNFMQLIHDDSLTFKEDIQKAQVSGQGDSLHEHIANLAGSPAIKKGILQTVKVVDELVKVMGRHKPENIVIEMARENQTTQKGQKNSRERMKRIEEGIKELGSQILKEHPVENTQLQNEKLYLYYLQNGRDMYVDQELDINRLSDYDVDHIVPQSFLKDDSIDNKVLTRSDKARGKSDNVPSEEVVKKMKNYWRQLLNAKLITQRKFDNLTKAERGGLSELDKAGFIKRQLVETRQITKHVAQILDSRMNTKYDENDKLIREVKVITLKSKLVSDFRKDFQFYKVREINNYHHAHDAYLNAVVGTALIKKYPKLESEFVYGDYKVYDVRKMIAKSEQEIGKATAKYFFYSNIMNFFKTEITLANGEIRKRPLIETNGETGEIVWDKGRDFATVRKVLSMPQVNIVKKTEVQTGGFSKESILPKRNSDKLIARKKDWDPKKYGGFDSPTVAYSVLVVAKVEKGKSKKLKSVKELLGITIMERSSFEKNPIDFLEAKGYKEVKKDLIIKLPKYSLFELENGRKRMLASAGELQKGNELALPSKYVNFLYLASHYEKLKGSPEDNEQKQLFVEQHKHYLDEIIEQISEFSKRVILADANLDKVLSAYNKHRDKPIREQAENIIHLFTLTNLGAPAAFKYFDTTIDRKRYTSTKEVLDATLIHQSITGLYETRIDLSQLGGDGGEAAAKPAPGSSGGVPWLTQQPLQLTILVPLQEYQEKILSKTALPEDQKQQLKTLFVKYDNLWQHWENQVGHRKIRPHNIATGDYPPRPQKQYPINPKAKPSIQIVIDDLLKQGVLTPQNSTMNTPVYPVPKPDGRWRMVLDYREVNKTIPLTAAQNQHSAGILATIVRQKYKTTLDLANGFWAHPITPESYWLTAFTWQGKQYCWTRLPQGFLNSPALFNADVVDLLKEIPNVQVYVDDIYLSHDDPKEHVQQLEKVFQILLQAGYVVSLKKSEIGQKTVEFLGFNITKEGRGLTDTFKTKLLNITPPKDLKQLQSILGKLNFARNFIPNFAELVQPLYNLIAPAKGKYIEWSEENTKQLNMVIEALNTASNLEERLPEQRLVIKVNTSPSAGYVRYYNETGKKPIMYLNYVFSKAELKFSMLEKLLTTMHKALIKAMDLAMGQEILVYSPIVSMTKIQKTPLPERKALPIRWITWMTYLEDPRIQFHYDKTLPELKHIPDVYTSSQSPVKHPSQYEGVFYTDGSAIKSPDPTKSNNAGMGIVHATYKPEYQVLNQWSIPLGNHTAQMAEIAAVEFACKKALKIPGPVLVITDSFYVAESANKELPYWKSNGFVNNKKKPLKHISKWKSIAECLSMKPDITIQHEKGISLQIPVFILKGNALADKLATQGSYVVNAGKRTADGSEFEKRTADGSEFESPKKKAKVE

SEQ ID NO: 7617 - protein, 2094 aa, synthetic construct
MPAAKRVKLDGGDKKYSIGLDIGTNSVGWAVITDEYKVPSKKFKVLGNTDRHSIKKNLIGALLFDSGETAEATRLKRTARRRYTRRKNRICYLQEIFSNEMAKVDDSFFHRLEESFLVEEDKKHERHPIFGNIVDEVAYHEKYPTIYHLRKKLVDSTDKADLRLIYLALAHMIKFRGHFLIEGDLNPDNSDVDKLFIQLVQTYNQLFEENPINASGVDAKAILSARLSKSRRLENLIAQLPGEKKNGLFGNLIALSLGLTPNFKSNFDLAEDAKLQLSKDTYDDDLDNLLAQIGDQYADLFLAAKNLSDAILLSDILRVNTEITKAPLSASMIKRYDEHHQDLTLLKALVRQQLPEKYKEIFFDQSKNGYAGYIDGGASQEEFYKFIKPILEKMDGTEELLVKLNREDLLRKQRTFDNGSIPHQIHLGELHAILRRQEDFYPFLKDNREKIEKILTFRIPYYVGPLARGNSRFAWMTRKSEETITPWNFEEVVDKGASAQSFIERMTNFDKNLPNEKVLPKHSLLYEYFTVYNELTKVKYVTEGMRKPAFLSGEQKKAIVDLLFKTNRKVTVKQLKEDYFKKIECFDSVEISGVEDRFNASLGTYHDLLKIIKDKDFLDNEENEDILEDIVLTLTLFEDREMIEERLKTYAHLFDDKVMKQLKRRRYTGWGRLSRKLINGIRDKQSGKTILDFLKSDGFANRNFMQLIHDDSLTFKEDIQKAQVSGQGDSLHEHIANLAGSPAIKKGILQTVKVVDELVKVMGRHKPENIVIEMARENQTTQKGQKNSRERMKRIEEGIKELGSQILKEHPVENTQLQNEKLYLYYLQNGRDMYVDQELDINRLSDYDVDHIVPQSFLKDDSIDNKVLTRSDKARGKSDNVPSEEVVKKMKNYWRQLLNAKLITQRKFDNLTKAERGGLSELDKAGFIKRQLVETRQITKHVAQILDSRMNTKYDENDKLIREVKVITLKSKLVSDFRKDFQFYKVREINNYHHAHDAYLNAVVGTALIKKYPKLESEFVYGDYKVYDVRKMIAKSEQEIGKATAKYFFYSNIMNFFKTEITLANGEIRKRPLIETNGETGEIVWDKGRDFATVRKVLSMPQVNIVKKTEVQTGGFSKESILPKRNSDKLIARKKDWDPKKYGGFDSPTVAYSVLVVAKVEKGKSKKLKSVKELLGITIMERSSFEKNPIDFLEAKGYKEVKKDLIIKLPKYSLFELENGRKRMLASAGELQKGNELALPSKYVNFLYLASHYEKLKGSPEDNEQKQLFVEQHKHYLDEIIEQISEFSKRVILADANLDKVLSAYNKHRDKPIREQAENIIHLFTLTNLGAPAAFKYFDTTIDRKRYTSTKEVLDATLIHQSITGLYETRIDLSQLGGDGGEAAAKPAPGSSGGVLNLEEEYRLHEKPVPSSIDPSWLQLFPTVWAERAGMGLANQVPPVVVELRSGASPVAVRQYPMSKEAREGIRPHIQKFLDLGVLVPCRSPWNTPLLPVKKPGTNDYRPVQDLREINKRVQDIHPTVPNPYNLLSSLPPSYTWYSVLDLKDAFFCLRLHPNSQPLFAFEWKDPEKGNTGQLTWTRLPQGFKNSPTLFNEALHRDLAPFRALNPQVVLLQYVDDLLVAAPTYEDCKKGTQKLLQELSKLGYRVSAKKAQLCQREVTYLGYLLKEGKRWLTPARKATVMKIPVPTTPRQVREFLGTAGFCRLWIPGFASLAAPLYPLTKPSIPFIWTEEHQQAFDHIKKALLSAPALALPDLTKPFTLYIDERAGVARGVLTQTLGPWRRPVAYLSKKLDPVASGWPTCLKAVAAVALLLKDADKLTLGQNVTVIASHSLESIVRQPPDRWMTNARMTHYQSLLLNERVSFAPPAVLNPATLLPVESEATPVHRCSEILAEETGTRRDLEDQPLPGVPTWYTDGSSFITEGKRRAGAPIVDGKRTVWASSLPEGTSAQKAELVALTQALRLAEGKNINIYTDSRYAFATAHIHGAIYKQRGWLTSAGKDIKNKEEILALLEAIHLPRRVAIIHCPGHQRGSNPVATGNRRADEAAKQAALSTRVLAGTTKPAGKRTADGSEFEKRTADGSEFESPKKKAKVE

SEQ ID NO: 7618 - protein, 2094 aa, synthetic construct
MPAAKRVKLDGGDKKYSIGLDIGTNSVGWAVITDEYKVPSKKFKVLGNTDRHSIKKNLIGALLFDSGETAEATRLKRTARRRYTRRKNRICYLQEIFSNEMAKVDDSFFHRLEESFLVEEDKKHERHPIFGNIVDEVAYHEKYPTIYHLRKKLVDSTDKADLRLIYLALAHMIKFRGHFLIEGDLNPDNSDVDKLFIQLVQTYNQLFEENPINASGVDAKAILSARLSKSRRLENLIAQLPGEKKNGLFGNLIALSLGLTPNFKSNFDLAEDAKLQLSKDTYDDDLDNLLAQIGDQYADLFLAAKNLSDAILLSDILRVNTEITKAPLSASMIKRYDEHHQDLTLLKALVRQQLPEKYKEIFFDQSKNGYAGYIDGGASQEEFYKFIKPILEKMDGTEELLVKLNREDLLRKQRTFDNGSIPHQIHLGELHAILRRQEDFYPFLKDNREKIEKILTFRIPYYVGPLARGNSRFAWMTRKSEETITPWNFEEVVDKGASAQSFIERMTNFDKNLPNEKVLPKHSLLYEYFTVYNELTKVKYVTEGMRKPAFLSGEQKKAIVDLLFKTNRKVTVKQLKEDYFKKIECFDSVEISGVEDRFNASLGTYHDLLKIIKDKDFLDNEENEDILEDIVLTLTLFEDREMIEERLKTYAHLFDDKVMKQLKRRRYTGWGRLSRKLINGIRDKQSGKTILDFLKSDGFANRNFMQLIHDDSLTFKEDIQKAQVSGQGDSLHEHIANLAGSPAIKKGILQTVKVVDELVKVMGRHKPENIVIEMARENQTTQKGQKNSRERMKRIEEGIKELGSQILKEHPVENTQLQNEKLYLYYLQNGRDMYVDQELDINRLSDYDVDHIVPQSFLKDDSIDNKVLTRSDKARGKSDNVPSEEVVKKMKNYWRQLLNAKLITQRKFDNLTKAERGGLSELDKAGFIKRQLVETRQITKHVAQILDSRMNTKYDENDKLIREVKVITLKSKLVSDFRKDFQFYKVREINNYHHAHDAYLNAVVGTALIKKYPKLESEFVYGDYKVYDVRKMIAKSEQEIGKATAKYFFYSNIMNFFKTEITLANGEIRKRPLIETNGETGEIVWDKGRDFATVRKVLSMPQVNIVKKTEVQTGGFSKESILPKRNSDKLIARKKDWDPKKYGGFDSPTVAYSVLVVAKVEKGKSKKLKSVKELLGITIMERSSFEKNPIDFLEAKGYKEVKKDLIIKLPKYSLFELENGRKRMLASAGELQKGNELALPSKYVNFLYLASHYEKLKGSPEDNEQKQLFVEQHKHYLDEIIEQISEFSKRVILADANLDKVLSAYNKHRDKPIREQAENIIHLFTLTNLGAPAAFKYFDTTIDRKRYTSTKEVLDATLIHQSITGLYETRIDLSQLGGDGGEAAAKPAPGSSGGVLNLEEEYRLHEKPVPSSIDPSWLQLFPTVWAERAGMGLANQVPPVVVELRSGASPVAVRQYPMSKEAREGIRPHIQKFLDLGVLVPCRSPWNTPLLPVKKPGTNDYRPVQDLREINKRVQDIHPTVPNPYNLLSSLPPSYTWYSVLDLKDAFFCLRLHPNSQPLFAFEWKDPEKGNTGQLTWTRLPQGFKNSPTLFNEALHRDLAPFRALNPQVVLLQYVDDLLVAAPTYEDCKKGTQKLLQELSKLGYRVSAKKAQLCQREVTYLGYLLKEGKRWLTPARKATVMKIPVPTTPRQVREFLGKAGFCRLFIPGFASLAAPLYPLTKPSIPFIWTEEHQQAFDHIKKALLSAPALALPDLTKPFTLYIDERAGVARGVLTQTLGPWRRPVAYLSKKLDPVASGWPTCLKAVAAVALLLKDADKLTLGQNVTVIASHSLESIVRQPPDRWMTNARMTHYQSLLLNERVSFAPPAVLNPATLLPVESEATPVHRCSEILAEETGTRRDLEDQPLPGVPTWYTDGSSFITEGKRRAGAPIVDGKRTVWASSLPEGTSAQKAELVALTQALRLAEGKNINIYTDSRYAFATAHIHGAIYKQRGWLTSAGKDIKNKEEILALLEAIHLPRRVAIIHCPGHQRGSNPVATGNRRADEAAKQAALSTRVLAGTTKPAGKRTADGSEFEKRTADGSEFESPKKKAKVE

SEQ ID NO: 7619 - protein, 2218 aa, synthetic construct
MPAAKRVKLDGGDKKYSIGLDIGTNSVGWAVITDEYKVPSKKFKVLGNTDRHSIKKNLIGALLFDSGETAEATRLKRTARRRYTRRKNRICYLQEIFSNEMAKVDDSFFHRLEESFLVEEDKKHERHPIFGNIVDEVAYHEKYPTIYHLRKKLVDSTDKADLRLIYLALAHMIKFRGHFLIEGDLNPDNSDVDKLFIQLVQTYNQLFEENPINASGVDAKAILSARLSKSRRLENLIAQLPGEKKNGLFGNLIALSLGLTPNFKSNFDLAEDAKLQLSKDTYDDDLDNLLAQIGDQYADLFLAAKNLSDAILLSDILRVNTEITKAPLSASMIKRYDEHHQDLTLLKALVRQQLPEKYKEIFFDQSKNGYAGYIDGGASQEEFYKFIKPILEKMDGTEELLVKLNREDLLRKQRTFDNGSIPHQIHLGELHAILRRQEDFYPFLKDNREKIEKILTFRIPYYVGPLARGNSRFAWMTRKSEETITPWNFEEVVDKGASAQSFIERMTNFDKNLPNEKVLPKHSLLYEYFTVYNELTKVKYVTEGMRKPAFLSGEQKKAIVDLLFKTNRKVTVKQLKEDYFKKIECFDSVEISGVEDRFNASLGTYHDLLKIIKDKDFLDNEENEDILEDIVLTLTLFEDREMIEERLKTYAHLFDDKVMKQLKRRRYTGWGRLSRKLINGIRDKQSGKTILDFLKSDGFANRNFMQLIHDDSLTFKEDIQKAQVSGQGDSLHEHIANLAGSPAIKKGILQTVKVVDELVKVMGRHKPENIVIEMARENQTTQKGQKNSRERMKRIEEGIKELGSQILKEHPVENTQLQNEKLYLYYLQNGRDMYVDQELDINRLSDYDVDHIVPQSFLKDDSIDNKVLTRSDKARGKSDNVPSEEVVKKMKNYWRQLLNAKLITQRKFDNLTKAERGGLSELDKAGFIKRQLVETRQITKHVAQILDSRMNTKYDENDKLIREVKVITLKSKLVSDFRKDFQFYKVREINNYHHAHDAYLNAVVGTALIKKYPKLESEFVYGDYKVYDVRKMIAKSEQEIGKATAKYFFYSNIMNFFKTEITLANGEIRKRPLIETNGETGEIVWDKGRDFATVRKVLSMPQVNIVKKTEVQTGGFSKESILPKRNSDKLIARKKDWDPKKYGGFDSPTVAYSVLVVAKVEKGKSKKLKSVKELLGITIMERSSFEKNPIDFLEAKGYKEVKKDLIIKLPKYSLFELENGRKRMLASAGELQKGNELALPSKYVNFLYLASHYEKLKGSPEDNEQKQLFVEQHKHYLDEIIEQISEFSKRVILADANLDKVLSAYNKHRDKPIREQAENIIHLFTLTNLGAPAAFKYFDTTIDRKRYTSTKEVLDATLIHQSITGLYETRIDLSQLGGDGGEAAAKPAPGSSGGTLGDQGSRGSDPLPEPRVTLTVEGIPTEFLVNTGAEHSVLTKPMGKMGSKRTVVAGATGSKVYPWTTKRLLKIGQKQVTHSFLVIPECPAPLLGRDLLTKLKAQIQFSTEGPQVTWEDRPAMCLVLNLEEEYRLHEKPVPPSIDPSWLQLFPMVWAEKAGMGLANQVPPVVVELKSDASPVAVRQYPMSKEAREGIRPHIQRFLDLGILVPCQSPWNTPLLPVKKPGTNDYRPVQDLREVNKRVQDIHPTVPNPYNLLSSLPPSHTWYSVLDLKDAFFCLKLHPNSQPLFAFEWRDPEKGNTGQLTWTRLPQGFKNSPTLFDEALHRDLASFRALNPQVVMLQYVDDLLVAAPTYRDCKEGTRRLLQELSKLGYRVSAKKAQLCREEVTYLGYLLKGGKRWLTPARKATVMKIPTPTTPRQVREFLGTAGFCRLWIPGFASLAAPLYPLTREKVPFTWTEAHQEAFGRIKEALLSAPALALPDLTKPFALYVDEKEGVARGVLTQTLGPWRRPVAYLSKKLDPVASGWPTCLKAIAAVALLLKDADKLTLGQNVLVIAPHNLESIVRQPPDRWMTNARMTHYQSLLLNERVSFAPPAILNPATLLPVESDDTPIHICSEILAEETGTRPDLRDQPLPGVPAWYTDGSSFIMDGRRQAGAAIVDNKRTVWASNLPEGTSAQKAELIALTQALRLAEGKSINIYTDSRYAFATAHVHGAIYKQRGLLTSAGKDIKNKEEILALLEAIHLPKRVAIIHCPGHQRGTDPVATGNRKADEAAKQAAQSTRILTETTKNAGKRTADGSEFEKRTADGSEFESPKKKAKVE

SEQ ID NO: 7620 - protein, 2218 aa, synthetic construct
MPAAKRVKLDGGDKKYSIGLDIGTNSVGWAVITDEYKVPSKKFKVLGNTDRHSIKKNLIGALLFDSGETAEATRLKRTARRRYTRRKNRICYLQEIFSNEMAKVDDSFFHRLEESFLVEEDKKHERHPIFGNIVDEVAYHEKYPTIYHLRKKLVDSTDKADLRLIYLALAHMIKFRGHFLIEGDLNPDNSDVDKLFIQLVQTYNQLFEENPINASGVDAKAILSARLSKSRRLENLIAQLPGEKKNGLFGNLIALSLGLTPNFKSNFDLAEDAKLQLSKDTYDDDLDNLLAQIGDQYADLFLAAKNLSDAILLSDILRVNTEITKAPLSASMIKRYDEHHQDLTLLKALVRQQLPEKYKEIFFDQSKNGYAGYIDGGASQEEFYKFIKPILEKMDGTEELLVKLNREDLLRKQRTFDNGSIPHQIHLGELHAILRRQEDFYPFLKDNREKIEKILTFRIPYYVGPLARGNSRFAWMTRKSEETITPWNFEEVVDKGASAQSFIERMTNFDKNLPNEKVLPKHSLLYEYFTVYNELTKVKYVTEGMRKPAFLSGEQKKAIVDLLFKTNRKVTVKQLKEDYFKKIECFDSVEISGVEDRFNASLGTYHDLLKIIKDKDFLDNEENEDILEDIVLTLTLFEDREMIEERLKTYAHLFDDKVMKQLKRRRYTGWGRLSRKLINGIRDKQSGKTILDFLKSDGFANRNFMQLIHDDSLTFKEDIQKAQVSGQGDSLHEHIANLAGSPAIKKGILQTVKVVDELVKVMGRHKPENIVIEMARENQTTQKGQKNSRERMKRIEEGIKELGSQILKEHPVENTQLQNEKLYLYYLQNGRDMYVDQELDINRLSDYDVDHIVPQSFLKDDSIDNKVLTRSDKARGKSDNVPSEEVVKKMKNYWRQLLNAKLITQRKFDNLTKAERGGLSELDKAGFIKRQLVETRQITKHVAQILDSRMNTKYDENDKLIREVKVITLKSKLVSDFRKDFQFYKVREINNYHHAHDAYLNAVVGTALIKKYPKLESEFVYGDYKVYDVRKMIAKSEQEIGKATAKYFFYSNIMNFFKTEITLANGEIRKRPLIETNGETGEIVWDKGRDFATVRKVLSMPQVNIVKKTEVQTGGFSKESILPKRNSDKLIARKKDWDPKKYGGFDSPTVAYSVLVVAKVEKGKSKKLKSVKELLGITIMERSSFEKNPIDFLEAKGYKEVKKDLIIKLPKYSLFELENGRKRMLASAGELQKGNELALPSKYVNFLYLASHYEKLKGSPEDNEQKQLFVEQHKHYLDEIIEQISEFSKRVILADANLDKVLSAYNKHRDKPIREQAENIIHLFTLTNLGAPAAFKYFDTTIDRKRYTSTKEVLDATLIHQSITGLYETRIDLSQLGGDGGEAAAKPAPGSSGGTLGDQGSRGSDPLPEPRVTLTVEGIPTEFLVNTGAEHSVLTKPMGKMGSKRTVVAGATGSKVYPWTTKRLLKIGQKQVTHSFLVIPECPAPLLGRDLLTKLKAQIQFSTEGPQVTWEDRPAMCLVLNLEEEYRLHEKPVPPSIDPSWLQLFPMVWAEKAGMGLANQVPPVVVELKSDASPVAVRQYPMSKEAREGIRPHIQRFLDLGILVPCQSPWNTPLLPVKKPGTNDYRPVQDLREVNKRVQDIHPTVPNPYNLLSSLPPSHTWYSVLDLKDAFFCLKLHPNSQPLFAFEWRDPEKGNTGQLTWTRLPQGFKNSPTLFNEALHRDLASFRALNPQVVMLQYVDDLLVAAPTYRDCKEGTRRLLQELSKLGYRVSAKKAQLCREEVTYLGYLLKGGKRWLTPARKATVMKIPTPTTPRQVREFLGTAGFCRLWIPGFASLAAPLYPLTRPKVPFTWTEAHQEAFGRIKEALLSAPALALPDLTKPFALYVDEKEGVARGVLTQTLGPWRRPVAYLSKKLDPVASGWPTCLKAIAAVALLLKDADKLTLGQNVLVIAPHNLESIVRQPPDRWMTNARMTHYQSLLLNERVSFAPPAILNPATLLPVESDDTPIHICSEILAEETGTRPDLRDQPLPGVPAWYTDGSSFIMDGRRQAGAAIVDNKRTVWASNLPEGTSAQKAELIALTQALRLAEGKSINIYTDSRYAFATAHVHGAIYKQRGWLTSAGKDIKNKEEILALLEAIHLPKRVAIIHCPGHQRGTDPVATGNRKADEAAKQAAQSTRILTETTKNAGKRTADGSEFEKRTADGSEFESPKKKAKVE

SEQ ID NO: 7621 - protein, 2096 aa, synthetic construct
MPAAKRVKLDGGDKKYSIGLDIGTNSVGWAVITDEYKVPSKKFKVLGNTDRHSIKKNLIGALLFDSGETAEATRLKRTARRRYTRRKNRICYLQEIFSNEMAKVDDSFFHRLEESFLVEEDKKHERHPIFGNIVDEVAYHEKYPTIYHLRKKLVDSTDKADLRLIYLALAHMIKFRGHFLIEGDLNPDNSDVDKLFIQLVQTYNQLFEENPINASGVDAKAILSARLSKSRRLENLIAQLPGEKKNGLFGNLIALSLGLTPNFKSNFDLAEDAKLQLSKDTYDDDLDNLLAQIGDQYADLFLAAKNLSDAILLSDILRVNTEITKAPLSASMIKRYDEHHQDLTLLKALVRQQLPEKYKEIFFDQSKNGYAGYIDGGASQEEFYKFIKPILEKMDGTEELLVKLNREDLLRKQRTFDNGSIPHQIHLGELHAILRRQEDFYPFLKDNREKIEKILTFRIPYYVGPLARGNSRFAWMTRKSEETITPWNFEEVVDKGASAQSFIERMTNFDKNLPNEKVLPKHSLLYEYFTVYNELTKVKYVTEGMRKPAFLSGEQKKAIVDLLFKTNRKVTVKQLKEDYFKKIECFDSVEISGVEDRFNASLGTYHDLLKIIKDKDFLDNEENEDILEDIVLTLTLFEDREMIEERLKTYAHLFDDKVMKQLKRRRYTGWGRLSRKLINGIRDKQSGKTILDFLKSDGFANRNFMQLIHDDSLTFKEDIQKAQVSGQGDSLHEHIANLAGSPAIKKGILQTVKVVDELVKVMGRHKPENIVIEMARENQTTQKGQKNSRERMKRIEEGIKELGSQILKEHPVENTQLQNEKLYLYYLQNGRDMYVDQELDINRLSDYDVDHIVPQSFLKDDSIDNKVLTRSDKARGKSDNVPSEEVVKKMKNYWRQLLNAKLITQRKFDNLTKAERGGLSELDKAGFIKRQLVETRQITKHVAQILDSRMNTKYDENDKLIREVKVITLKSKLVSDFRKDFQFYKVREINNYHHAHDAYLNAVVGTALIKKYPKLESEFVYGDYKVYDVRKMIAKSEQEIGKATAKYFFYSNIMNFFKTEITLANGEIRKRPLIETNGETGEIVWDKGRDFATVRKVLSMPQVNIVKKTEVQTGGFSKESILPKRNSDKLIARKKDWDPKKYGGFDSPTVAYSVLVVAKVEKGKSKKLKSVKELLGITIMERSSFEKNPIDFLEAKGYKEVKKDLIIKLPKYSLFELENGRKRMLASAGELQKGNELALPSKYVNFLYLASHYEKLKGSPEDNEQKQLFVEQHKHYLDEIIEQISEFSKRVILADANLDKVLSAYNKHRDKPIREQAENIIHLFTLTNLGAPAAFKYFDTTIDRKRYTSTKEVLDATLIHQSITGLYETRIDLSQLGGDGGEAAAKPAPGSSGGTLNLEDEYRLYETSAEPEVSPGSTWLSDFPQAWAETGGMGLAVRQAPLIIPLKATSTPVSIKQYPMSQEAKLGIKPHIQRLLDQGILVPCQSPWNTPLLPVKKPGTNDYRPVQDLREVNKRVEDIHPTVPNPYNLLSGLPPSHRWYTVLDLKDAFFCLRLHPTSQPLFAFEWRDPGMGISGQLTWTRLPQGFKNSPTLFNEALHRDLADFRIQHPDLILLQYVDDILLAATSELDCQQGTRALLLTLGNLGYRASAKKAQLCQKQVKYLGYLLKEGQRWLTEARKETVMGQPTPKTPRQLREFLGKAGFCRLFIPGFAEMAAPLYPLTKPGTLFNWGPDQQKAYQEIKQALLTAPALGLPDLTKPFELFVDEKQGYAKGVLTQKLGPWRRPVAYLSKKLDPVAAGWPPCLRMVAAIAVLRKDAGKLTMGQPLVILAPHAVEALVKQPPDRWLSNARMTHYQAMLLDTDRVQFGPVVALNPATLLPLPEEGAPHDCLEILAETHGTRPDLTDQPIPDADHTWYTDGSSFLQEGQRKAGAAVTTETEVIWARALPAGTSAQRAELIALTQALKMAEGKRLNVYTDSRYAFATAHIHGEIYRRRGWLTSEGREIKNKSEILALLKALFLPKRLSIIHCLGHQKGDSAEARGNRLADQAAREAAIKTPPDTSTLLAGKRTADGSEFEKRTADGSEFESPKKKAKVE

SEQ ID NO: 7622 - protein, 2096 aa, synthetic construct
MPAAKRVKLDGGDKKYSIGLDIGTNSVGWAVITDEYKVPSKKFKVLGNTDRHSIKKNLIGALLFDSGETAEATRLKRTARRRYTRRKNRICYLQEIFSNEMAKVDDSFFHRLEESFLVEEDKKHERHPIFGNIVDEVAYHEKYPTIYHLRKKLVDSTDKADLRLIYLALAHMIKFRGHFLIEGDLNPDNSDVDKLFIQLVQTYNQLFEENPINASGVDAKAILSARLSKSRRLENLIAQLPGEKKNGLFGNLIALSLGLTPNFKSNFDLAEDAKLQLSKDTYDDDLDNLLAQIGDQYADLFLAAKNLSDAILLSDILRVNTEITKAPLSASMIKRYDEHHQDLTLLKALVRQQLPEKYKEIFFDQSKNGYAGYIDGGASQEEFYKFIKPILEKMDGTEELLVKLNREDLLRKQRTFDNGSIPHQIHLGELHAILRRQEDFYPFLKDNREKIEKILTFRIPYYVGPLARGNSRFAWMTRKSEETITPWNFEEVVDKGASAQSFIERMTNFDKNLPNEKVLPKHSLLYEYFTVYNELTKVKYVTEGMRKPAFLSGEQKKAIVDLLFKTNRKVTVKQLKEDYFKKIECFDSVEISGVEDRFNASLGTYHDLLKIIKDKDFLDNEENEDILEDIVLTLTLFEDREMIEERLKTYAHLFDDKVMKQLKRRRYTGWGRLSRKLINGIRDKQSGKTILDFLKSDGFANRNFMQLIHDDSLTFKEDIQKAQVSGQGDSLHEHIANLAGSPAIKKGILQTVKVVDELVKVMGRHKPENIVIEMARENQTTQKGQKNSRERMKRIEEGIKELGSQILKEHPVENTQLQNEKLYLYYLQNGRDMYVDQELDINRLSDYDVDHIVPQSFLKDDSIDNKVLTRSDKARGKSDNVPSEEVVKKMKNYWRQLLNAKLITQRKFDNLTKAERGGLSELDKAGFIKRQLVETRQITKHVAQILDSRMNTKYDENDKLIREVKVITLKSKLVSDFRKDFQFYKVREINNYHHAHDAYLNAVVGTALIKKYPKLESEFVYGDYKVYDVRKMIAKSEQEIGKATAKYFFYSNIMNFFKTEITLANGEIRKRPLIETNGETGEIVWDKGRDFATVRKVLSMPQVNIVKKTEVQTGGFSKESILPKRNSDKLIARKKDWDPKKYGGFDSPTVAYSVLVVAKVEKGKSKKLKSVKELLGITIMERSSFEKNPIDFLEAKGYKEVKKDLIIKLPKYSLFELENGRKRMLASAGELQKGNELALPSKYVNFLYLASHYEKLKGSPEDNEQKQLFVEQHKHYLDEIIEQISEFSKRVILADANLDKVLSAYNKHRDKPIREQAENIIHLFTLTNLGAPAAFKYFDTTIDRKRYTSTKEVLDATLIHQSITGLYETRIDLSQLGGDGGEAAAKPAPGSSGGTLNIEDEYRLHETSKGPDVPLGSTWLSDFPQAWAETGGMGLAFRQAPLIISLKATSTPVSIKQYPMSQEARLGIKPHIQRLLDQGILVPCQSPWNTPLLPVKKPGTNDYRPVQDLREVNKRVEDIHPTVPNPYNLLSGLPPSHQWYTVLDLKDAFFCLRLHPTSQSLFAFEWKDPEMGISGQLTWTRLPQGFKNSPTLFNEALHRDLADFRIQHPDLILLQYVDDLLLAATSELDCQQGTRALLQTLGDLGYRASAKKAQICQKQVKYLGYLLKEGQRWLTEARKETVMGQPTPKTPRQLREFLGKAGLCRLFIPGFAEMAAPLYPLTKPGTLFKWGPDQQKAYQEIKQALLTAPALGLPDLTKPFELFVDEKQGYAKGVLTQKLGPWRRPVAYLSKKLDPVAAGWPPCLRMVAAIAVLTKDVGKLTMGQPLVILAPHAVEALVKQPPDRWLSNARMTHYQALLLDTDRVQFGPIVALNPATLLPLPEEGLQHDCLDILAEAHGTRPDLTDQPLPDADHTWYTDGSSFLQEGQRRAGAAVTTETEVIWAKALPAGTSAQRAELIALTQALKMAAGKKLNVYTDSRYAFATAHIHGEIYRRRGWLTSEGKEIKNKDEILALLKALFLPKRLSIIHCPGHQKGNHAEARGNRMADQAAREVATRETPETSTLLAGKRTADGSEFEKRTADGSEFESPKKKAKVE

SEQ ID NO: 7623 - protein, 2096 aa, synthetic construct
MPAAKRVKLDGGDKKYSIGLDIGTNSVGWAVITDEYKVPSKKFKVLGNTDRHSIKKNLIGALLFDSGETAEATRLKRTARRRYTRRKNRICYLQEIFSNEMAKVDDSFFHRLEESFLVEEDKKHERHPIFGNIVDEVAYHEKYPTIYHLRKKLVDSTDKADLRLIYLALAHMIKFRGHFLIEGDLNPDNSDVDKLFIQLVQTYNQLFEENPINASGVDAKAILSARLSKSRRLENLIAQLPGEKKNGLFGNLIALSLGLTPNFKSNFDLAEDAKLQLSKDTYDDDLDNLLAQIGDQYADLFLAAKNLSDAILLSDILRVNTEITKAPLSASMIKRYDEHHQDLTLLKALVRQQLPEKYKEIFFDQSKNGYAGYIDGGASQEEFYKFIKPILEKMDGTEELLVKLNREDLLRKQRTFDNGSIPHQIHLGELHAILRRQEDFYPFLKDNREKIEKILTFRIPYYVGPLARGNSRFAWMTRKSEETITPWNFEEVVDKGASAQSFIERMTNFDKNLPNEKVLPKHSLLYEYFTVYNELTKVKYVTEGMRKPAFLSGEQKKAIVDLLFKTNRKVTVKQLKEDYFKKIECFDSVEISGVEDRFNASLGTYHDLLKIIKDKDFLDNEENEDILEDIVLTLTLFEDREMIEERLKTYAHLFDDKVMKQLKRRRYTGWGRLSRKLINGIRDKQSGKTILDFLKSDGFANRNFMQLIHDDSLTFKEDIQKAQVSGQGDSLHEHIANLAGSPAIKKGILQTVKVVDELVKVMGRHKPENIVIEMARENQTTQKGQKNSRERMKRIEEGIKELGSQILKEHPVENTQLQNEKLYLYYLQNGRDMYVDQELDINRLSDYDVDHIVPQSFLKDDSIDNKVLTRSDKARGKSDNVPSEEVVKKMKNYWRQLLNAKLITQRKFDNLTKAERGGLSELDKAGFIKRQLVETRQITKHVAQILDSRMNTKYDENDKLIREVKVITLKSKLVSDFRKDFQFYKVREINNYHHAHDAYLNAVVGTALIKKYPKLESEFVYGDYKVYDVRKMIAKSEQEIGKATAKYFFYSNIMNFFKTEITLANGEIRKRPLIETNGETGEIVWDKGRDFATVRKVLSMPQVNIVKKTEVQTGGFSKESILPKRNSDKLIARKKDWDPKKYGGFDSPTVAYSVLVVAKVEKGKSKKLKSVKELLGITIMERSSFEKNPIDFLEAKGYKEVKKDLIIKLPKYSLFELENGRKRMLASAGELQKGNELALPSKYVNFLYLASHYEKLKGSPEDNEQKQLFVEQHKHYLDEIIEQISEFSKRVILADANLDKVLSAYNKHRDKPIREQAENIIHLFTLTNLGAPAAFKYFDTTIDRKRYTSTKEVLDATLIHQSITGLYETRIDLSQLGGDGGEAAAKPAPGSSGGTLNIEDEHRLHETSKEPDVSLGSTWLSDFPQAWAETGGMGLAVRQAPLIIPLKATSTPVSIKQYPMSQEARLGIKPHIQRLLDQGILVPCQSPWNTPLLPVKKPGTNDYRPVQDLREVNKRVEDIHPTVPNPYNLLSGLPPSHQWYTVLDLKDAFFCLRLHPTSQPLFAFEWRDPEMGISGQLTWTRLPQGFKNSPTLFDEALHRDLADFRIQHPDLILLQYVDDLLLAATSELDCQQGTRALLQTLGNLGYRASAKKAQICQKQVKYLGYLLKEGQRWLTEARKETVMGQPTPKTPRQLREFLGTAGFCRLWIPGFAEMAAPLYPLTKTGTLFNWGPDQQKAYQEIKQALLTAPALGLPDLTKPFELFVDEKQGYAKGVLTQKLGPWRRPVAYLSKKLDPVAAGWPPCLRMVAAIAVLTKDAGKLTMGQPLVILAPHAVEALVKQPPDRWLSNARMTHYQALLLDTDRVQFGPVVALNPATLLPLPEEGLQHNCLDILAEAHGTRPDLTDQPLPDADHTWYTDGSSLLQEGQRKAGAAVTTETEVIWAKALPAGTSAQRAELIALTQALKMAEGKKLNVYTDSRYAFATAHIHGEIYRRRGLLTSEGKEIKNKDEILALLKALFLPKRLSIIHCPGHQKGHSAEARGNRMADQAARKAAITETPDTSTLLAGKRTADGSEFEKRTADGSEFESPKKKAKVE

SEQ ID NO: 7624 - protein, 2090 aa, synthetic construct
MPAAKRVKLDGGDKKYSIGLDIGTNSVGWAVITDEYKVPSKKFKVLGNTDRHSIKKNLIGALLFDSGETAEATRLKRTARRRYTRRKNRICYLQEIFSNEMAKVDDSFFHRLEESFLVEEDKKHERHPIFGNIVDEVAYHEKYPTIYHLRKKLVDSTDKADLRLIYLALAHMIKFRGHFLIEGDLNPDNSDVDKLFIQLVQTYNQLFEENPINASGVDAKAILSARLSKSRRLENLIAQLPGEKKNGLFGNLIALSLGLTPNFKSNFDLAEDAKLQLSKDTYDDDLDNLLAQIGDQYADLFLAAKNLSDAILLSDILRVNTEITKAPLSASMIKRYDEHHQDLTLLKALVRQQLPEKYKEIFFDQSKNGYAGYIDGGASQEEFYKFIKPILEKMDGTEELLVKLNREDLLRKQRTFDNGSIPHQIHLGELHAILRRQEDFYPFLKDNREKIEKILTFRIPYYVGPLARGNSRFAWMTRKSEETITPWNFEEVVDKGASAQSFIERMTNFDKNLPNEKVLPKHSLLYEYFTVYNELTKVKYVTEGMRKPAFLSGEQKKAIVDLLFKTNRKVTVKQLKEDYFKKIECFDSVEISGVEDRFNASLGTYHDLLKIIKDKDFLDNEENEDILEDIVLTLTLFEDREMIEERLKTYAHLFDDKVMKQLKRRRYTGWGRLSRKLINGIRDKQSGKTILDFLKSDGFANRNFMQLIHDDSLTFKEDIQKAQVSGQGDSLHEHIANLAGSPAIKKGILQTVKVVDELVKVMGRHKPENIVIEMARENQTTQKGQKNSRERMKRIEEGIKELGSQILKEHPVENTQLQNEKLYLYYLQNGRDMYVDQELDINRLSDYDVDHIVPQSFLKDDSIDNKVLTRSDKARGKSDNVPSEEVVKKMKNYWRQLLNAKLITQRKFDNLTKAERGGLSELDKAGFIKRQLVETRQITKHVAQILDSRMNTKYDENDKLIREVKVITLKSKLVSDFRKDFQFYKVREINNYHHAHDAYLNAVVGTALIKKYPKLESEFVYGDYKVYDVRKMIAKSEQEIGKATAKYFFYSNIMNFFKTEITLANGEIRKRPLIETNGETGEIVWDKGRDFATVRKVLSMPQVNIVKKTEVQTGGFSKESILPKRNSDKLIARKKDWDPKKYGGFDSPTVAYSVLVVAKVEKGKSKKLKSVKELLGITIMERSSFEKNPIDFLEAKGYKEVKKDLIIKLPKYSLFELENGRKRMLASAGELQKGNELALPSKYVNFLYLASHYEKLKGSPEDNEQKQLFVEQHKHYLDEIIEQISEFSKRVILADANLDKVLSAYNKHRDKPIREQAENIIHLFTLTNLGAPAAFKYFDTTIDRKRYTSTKEVLDATLIHQSITGLYETRIDLSQLGGDGGEAAAKPAPGSSGGTLQLDDEYRLYSPLVKPDQNIQFWLEQFPQAWAETAGMGLAKQVPPQVIQLKASATPVSVRQYPLSKEAQEGIRPHVQRLIQQGILVPVQSPWNTPLLPVRKPGTNDYRPVQDLREVNKRVQDIHPTVPNPYNLLCALPPQRSWYTVLDLKDAFFCLRLHPTSQPLFAFEWRDPGTGRTGQLTWTRLPQGFKNSPTIFDEALHRDLANFRIQHPQVTLLQYVDDLLLAGATKQDCLEGTKALLLELSDLGYRASAKKAQICRREVTYLGYSLRDGQRWLTEARKKTVVQIPAPTTAKQVREFLGTAGFCRLWIPGFATLAAPLYPLTKEKGEFSWAPEHQKAFDAIKKALLSAPALALPDVTKPFTLYVDERKGVARGVLTQTLGPWRRPVAYLSKKLDPVASGWPVCLKAIAAVAILVKDADKLTLGQNITVIAPHALENIVRQPPDRWMTNARMTHYQSLLLTERVTFAPPAALNPATLLPEETDEPVTHDCHQLLIEETGVRKDLTDIPLTGEVLTWFTDGSSYVVEGKRMAGAAVVDGTRTIWASSLPEGTSAQKAELMALTQALRLAEGKSINIYTDSRYAFATAHVHGAIYKQRGLLTSAGREIKNKEEILSLLEALHLPKRLAIIHCPGHQKAKDPISRGNQMADRVAKQAAQGVNLLAGKRTADGSEFEKRTADGSEFESPKKKAKVE

SEQ ID NO: 7625 - protein, 2096 aa, synthetic construct
MPAAKRVKLDGGDKKYSIGLDIGTNSVGWAVITDEYKVPSKKFKVLGNTDRHSIKKNLIGALLFDSGETAEATRLKRTARRRYTRRKNRICYLQEIFSNEMAKVDDSFFHRLEESFLVEEDKKHERHPIFGNIVDEVAYHEKYPTIYHLRKKLVDSTDKADLRLIYLALAHMIKFRGHFLIEGDLNPDNSDVDKLFIQLVQTYNQLFEENPINASGVDAKAILSARLSKSRRLENLIAQLPGEKKNGLFGNLIALSLGLTPNFKSNFDLAEDAKLQLSKDTYDDDLDNLLAQIGDQYADLFLAAKNLSDAILLSDILRVNTEITKAPLSASMIKRYDEHHQDLTLLKALVRQQLPEKYKEIFFDQSKNGYAGYIDGGASQEEFYKFIKPILEKMDGTEELLVKLNREDLLRKQRTFDNGSIPHQIHLGELHAILRRQEDFYPFLKDNREKIEKILTFRIPYYVGPLARGNSRFAWMTRKSEETITPWNFEEVVDKGASAQSFIERMTNFDKNLPNEKVLPKHSLLYEYFTVYNELTKVKYVTEGMRKPAFLSGEQKKAIVDLLFKTNRKVTVKQLKEDYFKKIECFDSVEISGVEDRFNASLGTYHDLLKIIKDKDFLDNEENEDILEDIVLTLTLFEDREMIEERLKTYAHLFDDKVMKQLKRRRYTGWGRLSRKLINGIRDKQSGKTILDFLKSDGFANRNFMQLIHDDSLTFKEDIQKAQVSGQGDSLHEHIANLAGSPAIKKGILQTVKVVDELVKVMGRHKPENIVIEMARENQTTQKGQKNSRERMKRIEEGIKELGSQILKEHPVENTQLQNEKLYLYYLQNGRDMYVDQELDINRLSDYDVDHIVPQSFLKDDSIDNKVLTRSDKARGKSDNVPSEEVVKKMKNYWRQLLNAKLITQRKFDNLTKAERGGLSELDKAGFIKRQLVETRQITKHVAQILDSRMNTKYDENDKLIREVKVITLKSKLVSDFRKDFQFYKVREINNYHHAHDAYLNAVVGTALIKKYPKLESEFVYGDYKVYDVRKMIAKSEQEIGKATAKYFFYSNIMNFFKTEITLANGEIRKRPLIETNGETGEIVWDKGRDFATVRKVLSMPQVNIVKKTEVQTGGFSKESILPKRNSDKLIARKKDWDPKKYGGFDSPTVAYSVLVVAKVEKGKSKKLKSVKELLGITIMERSSFEKNPIDFLEAKGYKEVKKDLIIKLPKYSLFELENGRKRMLASAGELQKGNELALPSKYVNFLYLASHYEKLKGSPEDNEQKQLFVEQHKHYLDEIIEQISEFSKRVILADANLDKVLSAYNKHRDKPIREQAENIIHLFTLTNLGAPAAFKYFDTTIDRKRYTSTKEVLDATLIHQSITGLYETRIDLSQLGGDGGEAAAKPAPGSSGGTLNIEDEYRLHETSKEPDVPLGSTWLSDFPQAWAETGGMGLAVRQAPLIIPLKATSTPVSIKQYPMSQEARLGIKPHIQRLLDQGILVPCQSPWNTPLLPVKKPGTNDYRPVQDLREVNKRVEDIHPTVPNPYNLLSGLPPSHQWYTVLDLKDAFFCLRLHPTSQPLFAFEWRDPEMGISGQLTWTRLPQGFKNSPTLFNEALHRDLADFRIQHPDLILLQYVDDLLLAATSEQDCQRGTRALLQTLGNLGYRASAKKAQICQKQVKYLGYLLKEGQRWLTEARKETVMGQPTPKTPRQLREFLGTAGFCRLWIPGFAEMAAPLYPLTKPGTLFNWGPDQQKAYQEIKQALLTAPALGLPDLTKPFELFVDEKQGYAKGVLTQKLGPWRRPVAYLSKKLDPVAAGWPPCLRMVAAIAVLTKDAGKLTMGQPLVILAPHAVEALVKQPPDRWLSNARMTHYQAMLLDTDRVQFGPVVALNPATLLPLPEKEAPHDCLEILAETHGTRPDLTDQPIPDADYTWYTDGSSFLQEGQRRAGAAVTTETEVIWARALPAGTSAQRAELIALTQALKMAEGKKLNVYTDSRYAFATAHVHGEIYRRRGWLTSEGREIKNKNEILALLKALFLPKRLSIIHCPGHQKGNSAEARGNRMADQAAREAAMKAVLETSTLLAGKRTADGSEFEKRTADGSEFESPKKKAKVE

SEQ ID NO: 7626 - protein, 2098 aa, synthetic construct
MPAAKRVKLDGGDKKYSIGLDIGTNSVGWAVITDEYKVPSKKFKVLGNTDRHSIKKNLIGALLFDSGETAEATRLKRTARRRYTRRKNRICYLQEIFSNEMAKVDDSFFHRLEESFLVEEDKKHERHPIFGNIVDEVAYHEKYPTIYHLRKKLVDSTDKADLRLIYLALAHMIKFRGHFLIEGDLNPDNSDVDKLFIQLVQTYNQLFEENPINASGVDAKAILSARLSKSRRLENLIAQLPGEKKNGLFGNLIALSLGLTPNFKSNFDLAEDAKLQLSKDTYDDDLDNLLAQIGDQYADLFLAAKNLSDAILLSDILRVNTEITKAPLSASMIKRYDEHHQDLTLLKALVRQQLPEKYKEIFFDQSKNGYAGYIDGGASQEEFYKFIKPILEKMDGTEELLVKLNREDLLRKQRTFDNGSIPHQIHLGELHAILRRQEDFYPFLKDNREKIEKILTFRIPYYVGPLARGNSRFAWMTRKSEETITPWNFEEVVDKGASAQSFIERMTNFDKNLPNEKVLPKHSLLYEYFTVYNELTKVKYVTEGMRKPAFLSGEQKKAIVDLLFKTNRKVTVKQLKEDYFKKIECFDSVEISGVEDRFNASLGTYHDLLKIIKDKDFLDNEENEDILEDIVLTLTLFEDREMIEERLKTYAHLFDDKVMKQLKRRRYTGWGRLSRKLINGIRDKQSGKTILDFLKSDGFANRNFMQLIHDDSLTFKEDIQKAQVSGQGDSLHEHIANLAGSPAIKKGILQTVKVVDELVKVMGRHKPENIVIEMARENQTTQKGQKNSRERMKRIEEGIKELGSQILKEHPVENTQLQNEKLYLYYLQNGRDMYVDQELDINRLSDYDVDHIVPQSFLKDDSIDNKVLTRSDKARGKSDNVPSEEVVKKMKNYWRQLLNAKLITQRKFDNLTKAERGGLSELDKAGFIKRQLVETRQITKHVAQILDSRMNTKYDENDKLIREVKVITLKSKLVSDFRKDFQFYKVREINNYHHAHDAYLNAVVGTALIKKYPKLESEFVYGDYKVYDVRKMIAKSEQEIGKATAKYFFYSNIMNFFKTEITLANGEIRKRPLIETNGETGEIVWDKGRDFATVRKVLSMPQVNIVKKTEVQTGGFSKESILPKRNSDKLIARKKDWDPKKYGGFDSPTVAYSVLVVAKVEKGKSKKLKSVKELLGITIMERSSFEKNPIDFLEAKGYKEVKKDLIIKLPKYSLFELENGRKRMLASAGELQKGNELALPSKYVNFLYLASHYEKLKGSPEDNEQKQLFVEQHKHYLDEIIEQISEFSKRVILADANLDKVLSAYNKHRDKPIREQAENIIHLFTLTNLGAPAAFKYFDTTIDRKRYTSTKEVLDATLIHQSITGLYETRIDLSQLGGDGGPAPGSSEAAAKGGTAPLEEEYRLFLEAPIQNVTLLEQWKREIPKVWAEINPPGLASTQAPIHVQLLSTALPVRVRQYPITLEAKRSLRETIRKFRAAGILRPVHSPWNTPLLPVRKSGTSEYRMVQDLREVNKRVETIHPTVPNPYTLLSLLPPDRIWYSVLDLKDAFFCIPLAPESQLIFAFEWADAEEGESGQLTWTRLPQGFKNSPTLFNEALNRDLQGFRLDHPSVSLLQYVDDLLIAADTQAACLSATRDLLMTLAELGYRVSGKKAQLCQEEVTYLGFKIHKGSRSLSNSRTQAILQIPVPKTKRQVREFLGTIGYCRLWIPGFAELAQPLYAATRPGNDPLVWGEKEEEAFQSLKLALTQPPALALPSLDKPFQLFVEETSGAAKGVLTQALGPWKRPVAYLSKRLDPVAAGWPRCLRAIAAAALLTREASKLTFGQDIEITSSHNLESLLRSPPDKWLTNARITQYQVLLLDPPRVRFKQTAALNPATLLPETDDTLPIHHCLDTLDSLTSTRPDLTDQPLAQAEATLFTDGSSYIRDGKRYAGAAVVTLDSVIWAEPLPIGTSAQKAELIALTKALEWSKDKSVNIYTDSRYAFATLHVHGMIYRERGWLTAGGKAIKNAPEILALLTAVWLPKRVAVMHCKGHQKDDAPTSTGNRRADEVAREVAIRPLSTQATISAGKRTADGSEFEKRTADGSEFESPKKKAKVE

SEQ ID NO: 7627 - protein, 2098 aa, synthetic construct
MPAAKRVKLDGGDKKYSIGLDIGTNSVGWAVITDEYKVPSKKFKVLGNTDRHSIKKNLIGALLFDSGETAEATRLKRTARRRYTRRKNRICYLQEIFSNEMAKVDDSFFHRLEESFLVEEDKKHERHPIFGNIVDEVAYHEKYPTIYHLRKKLVDSTDKADLRLIYLALAHMIKFRGHFLIEGDLNPDNSDVDKLFIQLVQTYNQLFEENPINASGVDAKAILSARLSKSRRLENLIAQLPGEKKNGLFGNLIALSLGLTPNFKSNFDLAEDAKLQLSKDTYDDDLDNLLAQIGDQYADLFLAAKNLSDAILLSDILRVNTEITKAPLSASMIKRYDEHHQDLTLLKALVRQQLPEKYKEIFFDQSKNGYAGYIDGGASQEEFYKFIKPILEKMDGTEELLVKLNREDLLRKQRTFDNGSIPHQIHLGELHAILRRQEDFYPFLKDNREKIEKILTFRIPYYVGPLARGNSRFAWMTRKSEETITPWNFEEVVDKGASAQSFIERMTNFDKNLPNEKVLPKHSLLYEYFTVYNELTKVKYVTEGMRKPAFLSGEQKKAIVDLLFKTNRKVTVKQLKEDYFKKIECFDSVEISGVEDRFNASLGTYHDLLKIIKDKDFLDNEENEDILEDIVLTLTLFEDREMIEERLKTYAHLFDDKVMKQLKRRRYTGWGRLSRKLINGIRDKQSGKTILDFLKSDGFANRNFMQLIHDDSLTFKEDIQKAQVSGQGDSLHEHIANLAGSPAIKKGILQTVKVVDELVKVMGRHKPENIVIEMARENQTTQKGQKNSRERMKRIEEGIKELGSQILKEHPVENTQLQNEKLYLYYLQNGRDMYVDQELDINRLSDYDVDHIVPQSFLKDDSIDNKVLTRSDKARGKSDNVPSEEVVKKMKNYWRQLLNAKLITQRKFDNLTKAERGGLSELDKAGFIKRQLVETRQITKHVAQILDSRMNTKYDENDKLIREVKVITLKSKLVSDFRKDFQFYKVREINNYHHAHDAYLNAVVGTALIKKYPKLESEFVYGDYKVYDVRKMIAKSEQEIGKATAKYFFYSNIMNFFKTEITLANGEIRKRPLIETNGETGEIVWDKGRDFATVRKVLSMPQVNIVKKTEVQTGGFSKESILPKRNSDKLIARKKDWDPKKYGGFDSPTVAYSVLVVAKVEKGKSKKLKSVKELLGITIMERSSFEKNPIDFLEAKGYKEVKKDLIIKLPKYSLFELENGRKRMLASAGELQKGNELALPSKYVNFLYLASHYEKLKGSPEDNEQKQLFVEQHKHYLDEIIEQISEFSKRVILADANLDKVLSAYNKHRDKPIREQAENIIHLFTLTNLGAPAAFKYFDTTIDRKRYTSTKEVLDATLIHQSITGLYETRIDLSQLGGDGGPAPGSSEAAAKGGTAPLEEEYRLFLEAPIQNVTLLEQWKREIPKVWAEINPPGLASTQAPIHVQLLSTALPVRVRQYPITLEAKRSLRETIRKFRAAGILRPVHSPWNTPLLPVRKSGTSEYRMVQDLREVNKRVETIHPTVPNPYTLLSLLPPDRIWYSVLDLKDAFFCIPLAPESQLIFAFEWADAEEGESGQLTWTRLPQGFKNSPTLFNEALNRDLQGFRLDHPSVSLLQYVDDLLIAADTQAACLSATRDLLMTLAELGYRVSGKKAQLCQEEVTYLGFKIHKGSRSLSNSRTQAILQIPVPKTKRQVREFLGKIGYCRLFIPGFAELAQPLYAATRPGNDPLVWGEKEEEAFQSLKLALTQPPALALPSLDKPFQLFVEETSGAAKGVLTQALGPWKRPVAYLSKRLDPVAAGWPRCLRAIAAAALLTREASKLTFGQDIEITSSHNLESLLRSPPDKWLTNARITQYQVLLLDPPRVRFKQTAALNPATLLPETDDTLPIHHCLDTLDSLTSTRPDLTDQPLAQAEATLFTDGSSYIRDGKRYAGAAVVTLDSVIWAEPLPIGTSAQKAELIALTKALEWSKDKSVNIYTDSRYAFATLHVHGMIYRERGWLTAGGKAIKNAPEILALLTAVWLPKRVAVMHCKGHQKDDAPTSTGNRRADEVAREVAIRPLSTQATISAGKRTADGSEFEKRTADGSEFESPKKKAKVE

SEQ ID NO: 7628 - protein, 2087 aa, synthetic construct
MPAAKRVKLDGGDKKYSIGLDIGTNSVGWAVITDEYKVPSKKFKVLGNTDRHSIKKNLIGALLFDSGETAEATRLKRTARRRYTRRKNRICYLQEIFSNEMAKVDDSFFHRLEESFLVEEDKKHERHPIFGNIVDEVAYHEKYPTIYHLRKKLVDSTDKADLRLIYLALAHMIKFRGHFLIEGDLNPDNSDVDKLFIQLVQTYNQLFEENPINASGVDAKAILSARLSKSRRLENLIAQLPGEKKNGLFGNLIALSLGLTPNFKSNFDLAEDAKLQLSKDTYDDDLDNLLAQIGDQYADLFLAAKNLSDAILLSDILRVNTEITKAPLSASMIKRYDEHHQDLTLLKALVRQQLPEKYKEIFFDQSKNGYAGYIDGGASQEEFYKFIKPILEKMDGTEELLVKLNREDLLRKQRTFDNGSIPHQIHLGELHAILRRQEDFYPFLKDNREKIEKILTFRIPYYVGPLARGNSRFAWMTRKSEETITPWNFEEVVDKGASAQSFIERMTNFDKNLPNEKVLPKHSLLYEYFTVYNELTKVKYVTEGMRKPAFLSGEQKKAIVDLLFKTNRKVTVKQLKEDYFKKIECFDSVEISGVEDRFNASLGTYHDLLKIIKDKDFLDNEENEDILEDIVLTLTLFEDREMIEERLKTYAHLFDDKVMKQLKRRRYTGWGRLSRKLINGIRDKQSGKTILDFLKSDGFANRNFMQLIHDDSLTFKEDIQKAQVSGQGDSLHEHIANLAGSPAIKKGILQTVKVVDELVKVMGRHKPENIVIEMARENQTTQKGQKNSRERMKRIEEGIKELGSQILKEHPVENTQLQNEKLYLYYLQNGRDMYVDQELDINRLSDYDVDHIVPQSFLKDDSIDNKVLTRSDKARGKSDNVPSEEVVKKMKNYWRQLLNAKLITQRKFDNLTKAERGGLSELDKAGFIKRQLVETRQITKHVAQILDSRMNTKYDENDKLIREVKVITLKSKLVSDFRKDFQFYKVREINNYHHAHDAYLNAVVGTALIKKYPKLESEFVYGDYKVYDVRKMIAKSEQEIGKATAKYFFYSNIMNFFKTEITLANGEIRKRPLIETNGETGEIVWDKGRDFATVRKVLSMPQVNIVKKTEVQTGGFSKESILPKRNSDKLIARKKDWDPKKYGGFDSPTVAYSVLVVAKVEKGKSKKLKSVKELLGITIMERSSFEKNPIDFLEAKGYKEVKKDLIIKLPKYSLFELENGRKRMLASAGELQKGNELALPSKYVNFLYLASHYEKLKGSPEDNEQKQLFVEQHKHYLDEIIEQISEFSKRVILADANLDKVLSAYNKHRDKPIREQAENIIHLFTLTNLGAPAAFKYFDTTIDRKRYTSTKEVLDATLIHQSITGLYETRIDLSQLGGDGGPAPGSSEAAAKGGVPWILKKPLELTIKLDLEEQQGTLLNNSILSKKGKEELKQLFEKYSALWQSWENQVGHRRIRPHKIATGTVKPTPQKQYHINPKAKPDIQIVINDLLKQGVLIQKESTMNTPVYPVPKPNGRWRMVLDYRAVNKVTPLIAVQNQHSYGILGSLFKGRYKTTIDLSNGFWAHPIVPEDYWITAFTWQGKQYCWTVLPQGFLNSPGLFTGDVVDLLQGIPNVEVYVDDVYISHDSEKEHLEYLDILFNRLKEAGYIISLKKSNIANSIVDFLGFQITNEGRGLTDTFKEKLENITAPTTLKQLQSILGLLNFARNFIPDFTELIAPLYALIPKSTKNYVPWQIEHSTTLETLITKLNGAEYLQGRKGDKTLIMKVNASYTTGYIRYYNEGEKKPISYVSIVFSKTELKFTELEKLLTTVHKGLLKALDLSMGQNIHVYSPIVSMQNIQKTPQTAKKALASRWLSWLSYLEDPRIRFFYDPQMPALKDLPAVDTGKDNKKHPSNFQHIFYTDGSAITSPTKEGHLNAGMGIVYFINKDGNLQKQQEWSISLGNHTAQFAEIAAFEFALKKCLPLGGNILVVTDSNYVAKAYNEELDVWASNGFVNNRKKPLKHISKWKSVADLKRLRPDVVVTHEPGHQKLDSSPHAYGNNLADQLATQASFKVHAGKRTADGSEFEKRTADGSEFESPKKKAKVE

SEQ ID NO: 7629 - protein, 2095 aa, synthetic construct
MPAAKRVKLDGGDKKYSIGLDIGTNSVGWAVITDEYKVPSKKFKVLGNTDRHSIKKNLIGALLFDSGETAEATRLKRTARRRYTRRKNRICYLQEIFSNEMAKVDDSFFHRLEESFLVEEDKKHERHPIFGNIVDEVAYHEKYPTIYHLRKKLVDSTDKADLRLIYLALAHMIKFRGHFLIEGDLNPDNSDVDKLFIQLVQTYNQLFEENPINASGVDAKAILSARLSKSRRLENLIAQLPGEKKNGLFGNLIALSLGLTPNFKSNFDLAEDAKLQLSKDTYDDDLDNLLAQIGDQYADLFLAAKNLSDAILLSDILRVNTEITKAPLSASMIKRYDEHHQDLTLLKALVRQQLPEKYKEIFFDQSKNGYAGYIDGGASQEEFYKFIKPILEKMDGTEELLVKLNREDLLRKQRTFDNGSIPHQIHLGELHAILRRQEDFYPFLKDNREKIEKILTFRIPYYVGPLARGNSRFAWMTRKSEETITPWNFEEVVDKGASAQSFIERMTNFDKNLPNEKVLPKHSLLYEYFTVYNELTKVKYVTEGMRKPAFLSGEQKKAIVDLLFKTNRKVTVKQLKEDYFKKIECFDSVEISGVEDRFNASLGTYHDLLKIIKDKDFLDNEENEDILEDIVLTLTLFEDREMIEERLKTYAHLFDDKVMKQLKRRRYTGWGRLSRKLINGIRDKQSGKTILDFLKSDGFANRNFMQLIHDDSLTFKEDIQKAQVSGQGDSLHEHIANLAGSPAIKKGILQTVKVVDELVKVMGRHKPENIVIEMARENQTTQKGQKNSRERMKRIEEGIKELGSQILKEHPVENTQLQNEKLYLYYLQNGRDMYVDQELDINRLSDYDVDHIVPQSFLKDDSIDNKVLTRSDKARGKSDNVPSEEVVKKMKNYWRQLLNAKLITQRKFDNLTKAERGGLSELDKAGFIKRQLVETRQITKHVAQILDSRMNTKYDENDKLIREVKVITLKSKLVSDFRKDFQFYKVREINNYHHAHDAYLNAVVGTALIKKYPKLESEFVYGDYKVYDVRKMIAKSEQEIGKATAKYFFYSNIMNFFKTEITLANGEIRKRPLIETNGETGEIVWDKGRDFATVRKVLSMPQVNIVKKTEVQTGGFSKESILPKRNSDKLIARKKDWDPKKYGGFDSPTVAYSVLVVAKVEKGKSKKLKSVKELLGITIMERSSFEKNPIDFLEAKGYKEVKKDLIIKLPKYSLFELENGRKRMLASAGELQKGNELALPSKYVNFLYLASHYEKLKGSPEDNEQKQLFVEQHKHYLDEIIEQISEFSKRVILADANLDKVLSAYNKHRDKPIREQAENIIHLFTLTNLGAPAAFKYFDTTIDRKRYTSTKEVLDATLIHQSITGLYETRIDLSQLGGDGGPAPGSSEAAAKGGTLQLEEEYRLFEPESTQKQEMDIWLKNFPQAWAETGGMGTAHCQAPVLIQLKATATPISIRQYPMPHEAYQGIKPHIRRMLDQGILKPCQSPWNTPLLPVKKPGTEDYRPVQDLREVNKRVEDIHPTVPNPYNLLSTLPPSHPWYTVLDLKDAFFCLRLHSESQLLFAFEWRDPEIGLSGQLTWTRLPQGFKNSPTLFNEALHSDLADFRVRYPALVLLQYVDDLLLAAATRTECLEGTKALLETLGNKGYRASAKKAQICLQEVTYLGYSLKDGQRWLTKARKEAILSIPVPKNSRQVREFLGTAGYCRLWIPGFAELAAPLYPLTRPGTLFQWGTEQQLAFEDIKKALLSSPALGLPDITKPFELFIDENSGFAKGVLVQKLGPWKRPVAYLSKKLDTVASGWPPCLRMVAAIAILVKDAGKLTLGQPLTILTSHPVEALVRQPPNKWLSNARMTHYQAMLLDAERVHFGPTVSLNPATLLPLPSGGNHHDCLQILAETHGTRPDLTDQPLPDADLTWYTDGSSFIRNGEREAGAAVTTESEVIWAAPLPPGTSAQRAELIALTQALKMAEGKKLTVYTDSRYAFATTHVHGEIYRRRGWLTSEGKEIKNKNEILALLEALFLPKRLSIIHCPGHQKGDSPQAKGNRLADDTAKKAATETHSSLTVLPAGKRTADGSEFEKRTADGSEFESPKKKAKVE

SEQ ID NO: 7630 - protein, 2094 aa, synthetic construct
MPAAKRVKLDGGDKKYSIGLDIGTNSVGWAVITDEYKVPSKKFKVLGNTDRHSIKKNLIGALLFDSGETAEATRLKRTARRRYTRRKNRICYLQEIFSNEMAKVDDSFFHRLEESFLVEEDKKHERHPIFGNIVDEVAYHEKYPTIYHLRKKLVDSTDKADLRLIYLALAHMIKFRGHFLIEGDLNPDNSDVDKLFIQLVQTYNQLFEENPINASGVDAKAILSARLSKSRRLENLIAQLPGEKKNGLFGNLIALSLGLTPNFKSNFDLAEDAKLQLSKDTYDDDLDNLLAQIGDQYADLFLAAKNLSDAILLSDILRVNTEITKAPLSASMIKRYDEHHQDLTLLKALVRQQLPEKYKEIFFDQSKNGYAGYIDGGASQEEFYKFIKPILEKMDGTEELLVKLNREDLLRKQRTFDNGSIPHQIHLGELHAILRRQEDFYPFLKDNREKIEKILTFRIPYYVGPLARGNSRFAWMTRKSEETITPWNFEEVVDKGASAQSFIERMTNFDKNLPNEKVLPKHSLLYEYFTVYNELTKVKYVTEGMRKPAFLSGEQKKAIVDLLFKTNRKVTVKQLKEDYFKKIECFDSVEISGVEDRFNASLGTYHDLLKIIKDKDFLDNEENEDILEDIVLTLTLFEDREMIEERLKTYAHLFDDKVMKQLKRRRYTGWGRLSRKLINGIRDKQSGKTILDFLKSDGFANRNFMQLIHDDSLTFKEDIQKAQVSGQGDSLHEHIANLAGSPAIKKGILQTVKVVDELVKVMGRHKPENIVIEMARENQTTQKGQKNSRERMKRIEEGIKELGSQILKEHPVENTQLQNEKLYLYYLQNGRDMYVDQELDINRLSDYDVDHIVPQSFLKDDSIDNKVLTRSDKARGKSDNVPSEEVVKKMKNYWRQLLNAKLITQRKFDNLTKAERGGLSELDKAGFIKRQLVETRQITKHVAQILDSRMNTKYDENDKLIREVKVITLKSKLVSDFRKDFQFYKVREINNYHHAHDAYLNAVVGTALIKKYPKLESEFVYGDYKVYDVRKMIAKSEQEIGKATAKYFFYSNIMNFFKTEITLANGEIRKRPLIETNGETGEIVWDKGRDFATVRKVLSMPQVNIVKKTEVQTGGFSKESILPKRNSDKLIARKKDWDPKKYGGFDSPTVAYSVLVVAKVEKGKSKKLKSVKELLGITIMERSSFEKNPIDFLEAKGYKEVKKDLIIKLPKYSLFELENGRKRMLASAGELQKGNELALPSKYVNFLYLASHYEKLKGSPEDNEQKQLFVEQHKHYLDEIIEQISEFSKRVILADANLDKVLSAYNKHRDKPIREQAENIIHLFTLTNLGAPAAFKYFDTTIDRKRYTSTKEVLDATLIHQSITGLYETRIDLSQLGGDGGPAPGSSEAAAKGGVLNLEEEYRLHEKPVPSSIDPSWLQLFPTVWAERAGMGLANQVPPVVVELRSGASPVAVRQYPMSKEAREGIRPHIQKFLDLGVLVPCRSPWNTPLLPVKKPGTNDYRPVQDLREINKRVQDIHPTVPNPYNLLSSLPPSYTWYSVLDLKDAFFCLRLHPNSQPLFAFEWKDPEKGNTGQLTWTRLPQGFKNSPTLFNEALHRDLAPFRALNPQVVLLQYVDDLLVAAPTYEDCKKGTQKLLQELSKLGYRVSAKKAQLCQREVTYLGYLLKEGKRWLTPARKATVMKIPVPTTPRQVREFLGKAGFCRLFIPGFASLAAPLYPLTKPSIPFIWTEEHQQAFDHIKKALLSAPALALPDLTKPFTLYIDERAGVARGVLTQTLGPWRRPVAYLSKKLDPVASGWPTCLKAVAAVALLLKDADKLTLGQNVTVIASHSLESIVRQPPDRWMTNARMTHYQSLLLNERVSFAPPAVLNPATLLPVESEATPVHRCSEILAEETGTRRDLEDQPLPGVPTWYTDGSSFITEGKRRAGAPIVDGKRTVWASSLPEGTSAQKAELVALTQALRLAEGKNINIYTDSRYAFATAHIHGAIYKQRGWLTSAGKDIKNKEEILALLEAIHLPRRVAIIHCPGHQRGSNPVATGNRRADEAAKQAALSTRVLAGTTKPAGKRTADGSEFEKRTADGSEFESPKKKAKVE

SEQ ID NO: 7631 - protein, 2218 aa, synthetic construct
MPAAKRVKLDGGDKKYSIGLDIGTNSVGWAVITDEYKVPSKKFKVLGNTDRHSIKKNLIGALLFDSGETAEATRLKRTARRRYTRRKNRICYLQEIFSNEMAKVDDSFFHRLEESFLVEEDKKHERHPIFGNIVDEVAYHEKYPTIYHLRKKLVDSTDKADLRLIYLALAHMIKFRGHFLIEGDLNPDNSDVDKLFIQLVQTYNQLFEENPINASGVDAKAILSARLSKSRRLENLIAQLPGEKKNGLFGNLIALSLGLTPNFKSNFDLAEDAKLQLSKDTYDDDLDNLLAQIGDQYADLFLAAKNLSDAILLSDILRVNTEITKAPLSASMIKRYDEHHQDLTLLKALVRQQLPEKYKEIFFDQSKNGYAGYIDGGASQEEFYKFIKPILEKMDGTEELLVKLNREDLLRKQRTFDNGSIPHQIHLGELHAILRRQEDFYPFLKDNREKIEKILTFRIPYYVGPLARGNSRFAWMTRKSEETITPWNFEEVVDKGASAQSFIERMTNFDKNLPNEKVLPKHSLLYEYFTVYNELTKVKYVTEGMRKPAFLSGEQKKAIVDLLFKTNRKVTVKQLKEDYFKKIECFDSVEISGVEDRFNASLGTYHDLLKIIKDKDFLDNEENEDILEDIVLTLTLFEDREMIEERLKTYAHLFDDKVMKQLKRRRYTGWGRLSRKLINGIRDKQSGKTILDFLKSDGFANRNFMQLIHDDSLTFKEDIQKAQVSGQGDSLHEHIANLAGSPAIKKGILQTVKVVDELVKVMGRHKPENIVIEMARENQTTQKGQKNSRERMKRIEEGIKELGSQILKEHPVENTQLQNEKLYLYYLQNGRDMYVDQELDINRLSDYDVDHIVPQSFLKDDSIDNKVLTRSDKARGKSDNVPSEEVVKKMKNYWRQLLNAKLITQRKFDNLTKAERGGLSELDKAGFIKRQLVETRQITKHVAQILDSRMNTKYDENDKLIREVKVITLKSKLVSDFRKDFQFYKVREINNYHHAHDAYLNAVVGTALIKKYPKLESEFVYGDYKVYDVRKMIAKSEQEIGKATAKYFFYSNIMNFFKTEITLANGEIRKRPLIETNGETGEIVWDKGRDFATVRKVLSMPQVNIVKKTEVQTGGFSKESILPKRNSDKLIARKKDWDPKKYGGFDSPTVAYSVLVVAKVEKGKSKKLKSVKELLGITIMERSSFEKNPIDFLEAKGYKEVKKDLIIKLPKYSLFELENGRKRMLASAGELQKGNELALPSKYVNFLYLASHYEKLKGSPEDNEQKQLFVEQHKHYLDEIIEQISEFSKRVILADANLDKVLSAYNKHRDKPIREQAENIIHLFTLTNLGAPAAFKYFDTTIDRKRYTSTKEVLDATLIHQSITGLYETRIDLSQLGGDGGPAPGSSEAAAKGGTLGDQGSRGSDPLPEPRVTLTVEGIPTEFLVNTGAEHSVLTKPMGKMGSKRTVVAGATGSKVYPWTTKRLLKIGQKQVTHSFLVIPECPAPLLGRDLLTKLKAQIQFSTEGPQVTWEDRPAMCLVLNLEEEYRLHEKPVPPSIDPSWLQLFPMVWAEKAGMGLANQVPPVVVELKSDASPVAVRQYPMSKEAREGIRPHIQRFLDLGILVPCQSPWNTPLLPVKKPGTNDYRPVQDLREVNKRVQDIHPTVPNPYNLLSSLPPSHTWYSVLDLKDAFFCLKLHPNSQPLFAFEWRDPEKGNTGQLTWTRLPQGFKNSPTLFDEALHRDLASFRALNPQVVMLQYVDDLLVAAPTYRDCKEGTRRLLQELSKLGYRVSAKKAQLCREEVTYLGYLLKGGKRWLTPARKATVMKIPTPTTPRQVREFLGTAGFCRLWIPGFASLAAPLYPLTREKVPFTWTEAHQEAFGRIKEALLSAPALALPDLTKPFALYVDEKEGVARGVLTQTLGPWRRPVAYLSKKLDPVASGWPTCLKAIAAVALLLKDADKLTLGQNVLVIAPHNLESIVRQPPDRWMTNARMTHYQSLLLNERVSFAPPAILNPATLLPVESDDTPIHICSEILAEETGTRPDLRDQPLPGVPAWYTDGSSFIMDGRRQAGAAIVDNKRTVWASNLPEGTSAQKAELIALTQALRLAEGKSINIYTDSRYAFATAHVHGAIYKQRGLLTSAGKDIKNKEEILALLEAIHLPKRVAIIHCPGHQRGTDPVATGNRKADEAAKQAAQSTRILTETTKNAGKRTADGSEFEKRTADGSEFESPKKKAKVE

SEQ ID NO: 7632 - protein, 2127 aa, synthetic construct
MPAAKRVKLDGGDKKYSIGLDIGTNSVGWAVITDEYKVPSKKFKVLGNTDRHSIKKNLIGALLFDSGETAEATRLKRTARRRYTRRKNRICYLQEIFSNEMAKVDDSFFHRLEESFLVEEDKKHERHPIFGNIVDEVAYHEKYPTIYHLRKKLVDSTDKADLRLIYLALAHMIKFRGHFLIEGDLNPDNSDVDKLFIQLVQTYNQLFEENPINASGVDAKAILSARLSKSRRLENLIAQLPGEKKNGLFGNLIALSLGLTPNFKSNFDLAEDAKLQLSKDTYDDDLDNLLAQIGDQYADLFLAAKNLSDAILLSDILRVNTEITKAPLSASMIKRYDEHHQDLTLLKALVRQQLPEKYKEIFFDQSKNGYAGYIDGGASQEEFYKFIKPILEKMDGTEELLVKLNREDLLRKQRTFDNGSIPHQIHLGELHAILRRQEDFYPFLKDNREKIEKILTFRIPYYVGPLARGNSRFAWMTRKSEETITPWNFEEVVDKGASAQSFIERMTNFDKNLPNEKVLPKHSLLYEYFTVYNELTKVKYVTEGMRKPAFLSGEQKKAIVDLLFKTNRKVTVKQLKEDYFKKIECFDSVEISGVEDRFNASLGTYHDLLKIIKDKDFLDNEENEDILEDIVLTLTLFEDREMIEERLKTYAHLFDDKVMKQLKRRRYTGWGRLSRKLINGIRDKQSGKTILDFLKSDGFANRNFMQLIHDDSLTFKEDIQKAQVSGQGDSLHEHIANLAGSPAIKKGILQTVKVVDELVKVMGRHKPENIVIEMARENQTTQKGQKNSRERMKRIEEGIKELGSQILKEHPVENTQLQNEKLYLYYLQNGRDMYVDQELDINRLSDYDVDHIVPQSFLKDDSIDNKVLTRSDKARGKSDNVPSEEVVKKMKNYWRQLLNAKLITQRKFDNLTKAERGGLSELDKAGFIKRQLVETRQITKHVAQILDSRMNTKYDENDKLIREVKVITLKSKLVSDFRKDFQFYKVREINNYHHAHDAYLNAVVGTALIKKYPKLESEFVYGDYKVYDVRKMIAKSEQEIGKATAKYFFYSNIMNFFKTEITLANGEIRKRPLIETNGETGEIVWDKGRDFATVRKVLSMPQVNIVKKTEVQTGGFSKESILPKRNSDKLIARKKDWDPKKYGGFDSPTVAYSVLVVAKVEKGKSKKLKSVKELLGITIMERSSFEKNPIDFLEAKGYKEVKKDLIIKLPKYSLFELENGRKRMLASAGELQKGNELALPSKYVNFLYLASHYEKLKGSPEDNEQKQLFVEQHKHYLDEIIEQISEFSKRVILADANLDKVLSAYNKHRDKPIREQAENIIHLFTLTNLGAPAAFKYFDTTIDRKRYTSTKEVLDATLIHQSITGLYETRIDLSQLGGDGGPAPGSSEAAAKGGLLGRDLLTKLKAQIQFSTEGPQVTWEDRPAMCLVLNLEEEYRLHEKPVPPSIDPSWLQLFPMVWAEKAGMGLANQVPPVVVELKSDASPVAVRQYPMSKEAREGIRPHIQRFLDLGILVPCQSPWNTPLLPVKKPGTNDYRPVQDLREVNKRVQDIHPTVPNPYNLLSSLPPSHTWYSVLDLKDAFFCLKLHPNSQPLFAFEWRDPEKGNTGQLTWTRLPQGFKNSPTLFNEALHRDLASFRALNPQVVMLQYVDDLLVAAPTYRDCKEGTRRLLQELSKLGYRVSAKKAQLCREEVTYLGYLLKGGKRWLTPARKATVMKIPTPTTPRQVREFLGTAGFCRLWIPGFASLAAPLYPLTRPKVPFTWTEAHQEAFGRIKEALLSAPALALPDLTKPFALYVDEKEGVARGVLTQTLGPWRRPVAYLSKKLDPVASGWPTCLKAIAAVALLLKDADKLTLGQNVLVIAPHNLESIVRQPPDRWMTNARMTHYQSLLLNERVSFAPPAILNPATLLPVESDDTPIHICSEILAEETGTRPDLRDQPLPGVPAWYTDGSSFIMDGRRQAGAAIVDNKRTVWASNLPEGTSAQKAELIALTQALRLAEGKSINIYTDSRYAFATAHVHGAIYKQRGWLTSAGKDIKNKEEILALLEAIHLPKRVAIIHCPGHQRGTDPVATGNRKADEAAKQAAQSTRILTETTKNAGKRTADGSEFEKRTADGSEFESPKKKAKVE

SEQ ID NO: 7633 - protein, 2127 aa, synthetic construct
MPAAKRVKLDGGDKKYSIGLDIGTNSVGWAVITDEYKVPSKKFKVLGNTDRHSIKKNLIGALLFDSGETAEATRLKRTARRRYTRRKNRICYLQEIFSNEMAKVDDSFFHRLEESFLVEEDKKHERHPIFGNIVDEVAYHEKYPTIYHLRKKLVDSTDKADLRLIYLALAHMIKFRGHFLIEGDLNPDNSDVDKLFIQLVQTYNQLFEENPINASGVDAKAILSARLSKSRRLENLIAQLPGEKKNGLFGNLIALSLGLTPNFKSNFDLAEDAKLQLSKDTYDDDLDNLLAQIGDQYADLFLAAKNLSDAILLSDILRVNTEITKAPLSASMIKRYDEHHQDLTLLKALVRQQLPEKYKEIFFDQSKNGYAGYIDGGASQEEFYKFIKPILEKMDGTEELLVKLNREDLLRKQRTFDNGSIPHQIHLGELHAILRRQEDFYPFLKDNREKIEKILTFRIPYYVGPLARGNSRFAWMTRKSEETITPWNFEEVVDKGASAQSFIERMTNFDKNLPNEKVLPKHSLLYEYFTVYNELTKVKYVTEGMRKPAFLSGEQKKAIVDLLFKTNRKVTVKQLKEDYFKKIECFDSVEISGVEDRFNASLGTYHDLLKIIKDKDFLDNEENEDILEDIVLTLTLFEDREMIEERLKTYAHLFDDKVMKQLKRRRYTGWGRLSRKLINGIRDKQSGKTILDFLKSDGFANRNFMQLIHDDSLTFKEDIQKAQVSGQGDSLHEHIANLAGSPAIKKGILQTVKVVDELVKVMGRHKPENIVIEMARENQTTQKGQKNSRERMKRIEEGIKELGSQILKEHPVENTQLQNEKLYLYYLQNGRDMYVDQELDINRLSDYDVDHIVPQSFLKDDSIDNKVLTRSDKARGKSDNVPSEEVVKKMKNYWRQLLNAKLITQRKFDNLTKAERGGLSELDKAGFIKRQLVETRQITKHVAQILDSRMNTKYDENDKLIREVKVITLKSKLVSDFRKDFQFYKVREINNYHHAHDAYLNAVVGTALIKKYPKLESEFVYGDYKVYDVRKMIAKSEQEIGKATAKYFFYSNIMNFFKTEITLANGEIRKRPLIETNGETGEIVWDKGRDFATVRKVLSMPQVNIVKKTEVQTGGFSKESILPKRNSDKLIARKKDWDPKKYGGFDSPTVAYSVLVVAKVEKGKSKKLKSVKELLGITIMERSSFEKNPIDFLEAKGYKEVKKDLIIKLPKYSLFELENGRKRMLASAGELQKGNELALPSKYVNFLYLASHYEKLKGSPEDNEQKQLFVEQHKHYLDEIIEQISEFSKRVILADANLDKVLSAYNKHRDKPIREQAENIIHLFTLTNLGAPAAFKYFDTTIDRKRYTSTKEVLDATLIHQSITGLYETRIDLSQLGGDGGPAPGSSEAAAKGGLLGRDLLTKLKAQIQFSTEGPQVTWEDRPAMCLVLNLEEEYRLHEKPVPPSIDPSWLQLFPMVWAEKAGMGLANQVPPVVVELKSDASPVAVRQYPMSKEAREGIRPHIQRFLDLGILVPCQSPWNTPLLPVKKPGTNDYRPVQDLREVNKRVQDIHPTVPNPYNLLSSLPPSHTWYSVLDLKDAFFCLKLHPNSQPLFAFEWRDPEKGNTGQLTWTRLPQGFKNSPTLFNEALHRDLASFRALNPQVVMLQYVDDLLVAAPTYRDCKEGTRRLLQELSKLGYRVSAKKAQLCREEVTYLGYLLKGGKRWLTPARKATVMKIPTPTTPRQVREFLGKAGFCRLFIPGFASLAAPLYPLTRPKVPFTWTEAHQEAFGRIKEALLSAPALALPDLTKPFALYVDEKEGVARGVLTQTLGPWRRPVAYLSKKLDPVASGWPTCLKAIAAVALLLKDADKLTLGQNVLVIAPHNLESIVRQPPDRWMTNARMTHYQSLLLNERVSFAPPAILNPATLLPVESDDTPIHICSEILAEETGTRPDLRDQPLPGVPAWYTDGSSFIMDGRRQAGAAIVDNKRTVWASNLPEGTSAQKAELIALTQALRLAEGKSINIYTDSRYAFATAHVHGAIYKQRGWLTSAGKDIKNKEEILALLEAIHLPKRVAIIHCPGHQRGTDPVATGNRKADEAAKQAAQSTRILTETTKNAGKRTADGSEFEKRTADGSEFESPKKKAKVE

SEQ ID NO: 7634 - protein, 2218 aa, synthetic construct
MPAAKRVKLDGGDKKYSIGLDIGTNSVGWAVITDEYKVPSKKFKVLGNTDRHSIKKNLIGALLFDSGETAEATRLKRTARRRYTRRKNRICYLQEIFSNEMAKVDDSFFHRLEESFLVEEDKKHERHPIFGNIVDEVAYHEKYPTIYHLRKKLVDSTDKADLRLIYLALAHMIKFRGHFLIEGDLNPDNSDVDKLFIQLVQTYNQLFEENPINASGVDAKAILSARLSKSRRLENLIAQLPGEKKNGLFGNLIALSLGLTPNFKSNFDLAEDAKLQLSKDTYDDDLDNLLAQIGDQYADLFLAAKNLSDAILLSDILRVNTEITKAPLSASMIKRYDEHHQDLTLLKALVRQQLPEKYKEIFFDQSKNGYAGYIDGGASQEEFYKFIKPILEKMDGTEELLVKLNREDLLRKQRTFDNGSIPHQIHLGELHAILRRQEDFYPFLKDNREKIEKILTFRIPYYVGPLARGNSRFAWMTRKSEETITPWNFEEVVDKGASAQSFIERMTNFDKNLPNEKVLPKHSLLYEYFTVYNELTKVKYVTEGMRKPAFLSGEQKKAIVDLLFKTNRKVTVKQLKEDYFKKIECFDSVEISGVEDRFNASLGTYHDLLKIIKDKDFLDNEENEDILEDIVLTLTLFEDREMIEERLKTYAHLFDDKVMKQLKRRRYTGWGRLSRKLINGIRDKQSGKTILDFLKSDGFANRNFMQLIHDDSLTFKEDIQKAQVSGQGDSLHEHIANLAGSPAIKKGILQTVKVVDELVKVMGRHKPENIVIEMARENQTTQKGQKNSRERMKRIEEGIKELGSQILKEHPVENTQLQNEKLYLYYLQNGRDMYVDQELDINRLSDYDVDHIVPQSFLKDDSIDNKVLTRSDKARGKSDNVPSEEVVKKMKNYWRQLLNAKLITQRKFDNLTKAERGGLSELDKAGFIKRQLVETRQITKHVAQILDSRMNTKYDENDKLIREVKVITLKSKLVSDFRKDFQFYKVREINNYHHAHDAYLNAVVGTALIKKYPKLESEFVYGDYKVYDVRKMIAKSEQEIGKATAKYFFYSNIMNFFKTEITLANGEIRKRPLIETNGETGEIVWDKGRDFATVRKVLSMPQVNIVKKTEVQTGGFSKESILPKRNSDKLIARKKDWDPKKYGGFDSPTVAYSVLVVAKVEKGKSKKLKSVKELLGITIMERSSFEKNPIDFLEAKGYKEVKKDLIIKLPKYSLFELENGRKRMLASAGELQKGNELALPSKYVNFLYLASHYEKLKGSPEDNEQKQLFVEQHKHYLDEIIEQISEFSKRVILADANLDKVLSAYNKHRDKPIREQAENIIHLFTLTNLGAPAAFKYFDTTIDRKRYTSTKEVLDATLIHQSITGLYETRIDLSQLGGDGGPAPGSSEAAAKGGTLGDQGSRGSDPLPEPRVTLTVEGIPTEFLVNTGAEHSVLTKPMGKMGSKRTVVAGATGSKVYPWTTKRLLKIGQKQVTHSFLVIPECPAPLLGRDLLTKLKAQIQFSTEGPQVTWEDRPAMCLVLNLEEEYRLHEKPVPPSIDPSWLQLFPMVWAEKAGMGLANQVPPVVVELKSDASPVAVRQYPMSKEAREGIRPHIQRFLDLGILVPCQSPWNTPLLPVKKPGTNDYRPVQDLREVNKRVQDIHPTVPNPYNLLSSLPPSHTWYSVLDLKDAFFCLKLHPNSQPLFAFEWRDPEKGNTGQLTWTRLPQGFKNSPTLFNEALHRDLASFRALNPQVVMLQYVDDLLVAAPTYRDCKEGTRRLLQELSKLGYRVSAKKAQLCREEVTYLGYLLKGGKRWLTPARKATVMKIPTPTTPRQVREFLGTAGFCRLWIPGFASLAAPLYPLTRPKVPFTWTEAHQEAFGRIKEALLSAPALALPDLTKPFALYVDEKEGVARGVLTQTLGPWRRPVAYLSKKLDPVASGWPTCLKAIAAVALLLKDADKLTLGQNVLVIAPHNLESIVRQPPDRWMTNARMTHYQSLLLNERVSFAPPAILNPATLLPVESDDTPIHICSEILAEETGTRPDLRDQPLPGVPAWYTDGSSFIMDGRRQAGAAIVDNKRTVWASNLPEGTSAQKAELIALTQALRLAEGKSINIYTDSRYAFATAHVHGAIYKQRGWLTSAGKDIKNKEEILALLEAIHLPKRVAIIHCPGHQRGTDPVATGNRKADEAAKQAAQSTRILTETTKNAGKRTADGSEFEKRTADGSEFESPKKKAKVE

SEQ ID NO: 7635 - protein, 2218 aa, synthetic construct
MPAAKRVKLDGGDKKYSIGLDIGTNSVGWAVITDEYKVPSKKFKVLGNTDRHSIKKNLIGALLFDSGETAEATRLKRTARRRYTRRKNRICYLQEIFSNEMAKVDDSFFHRLEESFLVEEDKKHERHPIFGNIVDEVAYHEKYPTIYHLRKKLVDSTDKADLRLIYLALAHMIKFRGHFLIEGDLNPDNSDVDKLFIQLVQTYNQLFEENPINASGVDAKAILSARLSKSRRLENLIAQLPGEKKNGLFGNLIALSLGLTPNFKSNFDLAEDAKLQLSKDTYDDDLDNLLAQIGDQYADLFLAAKNLSDAILLSDILRVNTEITKAPLSASMIKRYDEHHQDLTLLKALVRQQLPEKYKEIFFDQSKNGYAGYIDGGASQEEFYKFIKPILEKMDGTEELLVKLNREDLLRKQRTFDNGSIPHQIHLGELHAILRRQEDFYPFLKDNREKIEKILTFRIPYYVGPLARGNSRFAWMTRKSEETITPWNFEEVVDKGASAQSFIERMTNFDKNLPNEKVLPKHSLLYEYFTVYNELTKVKYVTEGMRKPAFLSGEQKKAIVDLLFKTNRKVTVKQLKEDYFKKIECFDSVEISGVEDRFNASLGTYHDLLKIIKDKDFLDNEENEDILEDIVLTLTLFEDREMIEERLKTYAHLFDDKVMKQLKRRRYTGWGRLSRKLINGIRDKQSGKTILDFLKSDGFANRNFMQLIHDDSLTFKEDIQKAQVSGQGDSLHEHIANLAGSPAIKKGILQTVKVVDELVKVMGRHKPENIVIEMARENQTTQKGQKNSRERMKRIEEGIKELGSQILKEHPVENTQLQNEKLYLYYLQNGRDMYVDQELDINRLSDYDVDHIVPQSFLKDDSIDNKVLTRSDKARGKSDNVPSEEVVKKMKNYWRQLLNAKLITQRKFDNLTKAERGGLSELDKAGFIKRQLVETRQITKHVAQILDSRMNTKYDENDKLIREVKVITLKSKLVSDFRKDFQFYKVREINNYHHAHDAYLNAVVGTALIKKYPKLESEFVYGDYKVYDVRKMIAKSEQEIGKATAKYFFYSNIMNFFKTEITLANGEIRKRPLIETNGETGEIVWDKGRDFATVRKVLSMPQVNIVKKTEVQTGGFSKESILPKRNSDKLIARKKDWDPKKYGGFDSPTVAYSVLVVAKVEKGKSKKLKSVKELLGITIMERSSFEKNPIDFLEAKGYKEVKKDLIIKLPKYSLFELENGRKRMLASAGELQKGNELALPSKYVNFLYLASHYEKLKGSPEDNEQKQLFVEQHKHYLDEIIEQISEFSKRVILADANLDKVLSAYNKHRDKPIREQAENIIHLFTLTNLGAPAAFKYFDTTIDRKRYTSTKEVLDATLIHQSITGLYETRIDLSQLGGDGGPAPGSSEAAAKGGTLGDQGSRGSDPLPEPRVTLTVEGIPTEFLVNTGAEHSVLTKPMGKMGSKRTVVAGATGSKVYPWTTKRLLKIGQKQVTHSFLVIPECPAPLLGRDLLTKLKAQIQFSTEGPQVTWEDRPAMCLVLNLEEEYRLHEKPVPPSIDPSWLQLFPMVWAEKAGMGLANQVPPVVVELKSDASPVAVRQYPMSKEAREGIRPHIQRFLDLGILVPCQSPWNTPLLPVKKPGTNDYRPVQDLREVNKRVQDIHPTVPNPYNLLSSLPPSHTWYSVLDLKDAFFCLKLHPNSQPLFAFEWRDPEKGNTGQLTWTRLPQGFKNSPTLFNEALHRDLASFRALNPQVVMLQYVDDLLVAAPTYRDCKEGTRRLLQELSKLGYRVSAKKAQLCREEVTYLGYLLKGGKRWLTPARKATVMKIPTPTTPRQVREFLGKAGFCRLFIPGFASLAAPLYPLTRPKVPFTWTEAHQEAFGRIKEALLSAPALALPDLTKPFALYVDEKEGVARGVLTQTLGPWRRPVAYLSKKLDPVASGWPTCLKAIAAVALLLKDADKLTLGQNVLVIAPHNLESIVRQPPDRWMTNARMTHYQSLLLNERVSFAPPAILNPATLLPVESDDTPIHICSEILAEETGTRPDLRDQPLPGVPAWYTDGSSFIMDGRRQAGAAIVDNKRTVWASNLPEGTSAQKAELIALTQALRLAEGKSINIYTDSRYAFATAHVHGAIYKQRGWLTSAGKDIKNKEEILALLEAIHLPKRVAIIHCPGHQRGTDPVATGNRKADEAAKQAAQSTRILTETTKNAGKRTADGSEFEKRTADGSEFESPKKKAKVE

SEQ ID NO: 7636 - protein, 2096 aa, synthetic construct
MPAAKRVKLDGGDKKYSIGLDIGTNSVGWAVITDEYKVPSKKFKVLGNTDRHSIKKNLIGALLFDSGETAEATRLKRTARRRYTRRKNRICYLQEIFSNEMAKVDDSFFHRLEESFLVEEDKKHERHPIFGNIVDEVAYHEKYPTIYHLRKKLVDSTDKADLRLIYLALAHMIKFRGHFLIEGDLNPDNSDVDKLFIQLVQTYNQLFEENPINASGVDAKAILSARLSKSRRLENLIAQLPGEKKNGLFGNLIALSLGLTPNFKSNFDLAEDAKLQLSKDTYDDDLDNLLAQIGDQYADLFLAAKNLSDAILLSDILRVNTEITKAPLSASMIKRYDEHHQDLTLLKALVRQQLPEKYKEIFFDQSKNGYAGYIDGGASQEEFYKFIKPILEKMDGTEELLVKLNREDLLRKQRTFDNGSIPHQIHLGELHAILRRQEDFYPFLKDNREKIEKILTFRIPYYVGPLARGNSRFAWMTRKSEETITPWNFEEVVDKGASAQSFIERMTNFDKNLPNEKVLPKHSLLYEYFTVYNELTKVKYVTEGMRKPAFLSGEQKKAIVDLLFKTNRKVTVKQLKEDYFKKIECFDSVEISGVEDRFNASLGTYHDLLKIIKDKDFLDNEENEDILEDIVLTLTLFEDREMIEERLKTYAHLFDDKVMKQLKRRRYTGWGRLSRKLINGIRDKQSGKTILDFLKSDGFANRNFMQLIHDDSLTFKEDIQKAQVSGQGDSLHEHIANLAGSPAIKKGILQTVKVVDELVKVMGRHKPENIVIEMARENQTTQKGQKNSRERMKRIEEGIKELGSQILKEHPVENTQLQNEKLYLYYLQNGRDMYVDQELDINRLSDYDVDHIVPQSFLKDDSIDNKVLTRSDKARGKSDNVPSEEVVKKMKNYWRQLLNAKLITQRKFDNLTKAERGGLSELDKAGFIKRQLVETRQITKHVAQILDSRMNTKYDENDKLIREVKVITLKSKLVSDFRKDFQFYKVREINNYHHAHDAYLNAVVGTALIKKYPKLESEFVYGDYKVYDVRKMIAKSEQEIGKATAKYFFYSNIMNFFKTEITLANGEIRKRPLIETNGETGEIVWDKGRDFATVRKVLSMPQVNIVKKTEVQTGGFSKESILPKRNSDKLIARKKDWDPKKYGGFDSPTVAYSVLVVAKVEKGKSKKLKSVKELLGITIMERSSFEKNPIDFLEAKGYKEVKKDLIIKLPKYSLFELENGRKRMLASAGELQKGNELALPSKYVNFLYLASHYEKLKGSPEDNEQKQLFVEQHKHYLDEIIEQISEFSKRVILADANLDKVLSAYNKHRDKPIREQAENIIHLFTLTNLGAPAAFKYFDTTIDRKRYTSTKEVLDATLIHQSITGLYETRIDLSQLGGDGGPAPGSSEAAAKGGTLGIEDEYRLHETSTEPDVSLGSTWLSDFPQAWAETGGMGLAVRQAPLIIPLKATSTPVSIQQYPMSHEARLGIKPHIQRLLDQGILVPCQSPWNTPLLPVKKPGTNDYRPVQDLREVNKRVEDIHPTVPNPYNLLSGLPPSHQWYTVLDLKDAFFCLRLHPTSQPLFAFEWRDPGMGISGQLTWTRLPQGFKNSPTLFNEALHRDLADFRIQHPDLILLQYVDDILLAATSELDCQQGTRALLQTLGDLGYRASAKKAQICQKQVKYLGYLLREGQRWLTEARKETVMGQPVPKTPRQLREFLGTAGFCRLWIPGFAEMAAPLYPLTKPGTLFSWGPDQQKAYQEIKQALLTAPALGLPDLTKPFELFVDEKQGYAKGVLTQKLGPWRRPVAYLSKKLDPVAAGWPPCLRMVAAIAVLTKDAGKLTMGQPLVILAPHAVEALVKQPPDRWLSNARMTHYQAMLLDTDRVQFGPVVALNPATLLPLPEEGAPHDCLEILAETHGTRPDLTDQPIPDADHTWYTDGSSFLQEGQRKAGAAVTTETEVIWAGALPAGTSAQRAELIALTQALKMAEGKRLNVYTDSRYAFATAHIHGEIYRRRGWLTSEGREIKNKSEILALLKALFLPKRLSIIHCLGHQKGDSAEARGNRLADQAAREAAIKTPPDTSTLLAGKRTADGSEFEKRTADGSEFESPKKKAKVE

SEQ ID NO: 7637 - protein, 2096 aa, synthetic construct
MPAAKRVKLDGGDKKYSIGLDIGTNSVGWAVITDEYKVPSKKFKVLGNTDRHSIKKNLIGALLFDSGETAEATRLKRTARRRYTRRKNRICYLQEIFSNEMAKVDDSFFHRLEESFLVEEDKKHERHPIFGNIVDEVAYHEKYPTIYHLRKKLVDSTDKADLRLIYLALAHMIKFRGHFLIEGDLNPDNSDVDKLFIQLVQTYNQLFEENPINASGVDAKAILSARLSKSRRLENLIAQLPGEKKNGLFGNLIALSLGLTPNFKSNFDLAEDAKLQLSKDTYDDDLDNLLAQIGDQYADLFLAAKNLSDAILLSDILRVNTEITKAPLSASMIKRYDEHHQDLTLLKALVRQQLPEKYKEIFFDQSKNGYAGYIDGGASQEEFYKFIKPILEKMDGTEELLVKLNREDLLRKQRTFDNGSIPHQIHLGELHAILRRQEDFYPFLKDNREKIEKILTFRIPYYVGPLARGNSRFAWMTRKSEETITPWNFEEVVDKGASAQSFIERMTNFDKNLPNEKVLPKHSLLYEYFTVYNELTKVKYVTEGMRKPAFLSGEQKKAIVDLLFKTNRKVTVKQLKEDYFKKIECFDSVEISGVEDRFNASLGTYHDLLKIIKDKDFLDNEENEDILEDIVLTLTLFEDREMIEERLKTYAHLFDDKVMKQLKRRRYTGWGRLSRKLINGIRDKQSGKTILDFLKSDGFANRNFMQLIHDDSLTFKEDIQKAQVSGQGDSLHEHIANLAGSPAIKKGILQTVKVVDELVKVMGRHKPENIVIEMARENQTTQKGQKNSRERMKRIEEGIKELGSQILKEHPVENTQLQNEKLYLYYLQNGRDMYVDQELDINRLSDYDVDHIVPQSFLKDDSIDNKVLTRSDKARGKSDNVPSEEVVKKMKNYWRQLLNAKLITQRKFDNLTKAERGGLSELDKAGFIKRQLVETRQITKHVAQILDSRMNTKYDENDKLIREVKVITLKSKLVSDFRKDFQFYKVREINNYHHAHDAYLNAVVGTALIKKYPKLESEFVYGDYKVYDVRKMIAKSEQEIGKATAKYFFYSNIMNFFKTEITLANGEIRKRPLIETNGETGEIVWDKGRDFATVRKVLSMPQVNIVKKTEVQTGGFSKESILPKRNSDKLIARKKDWDPKKYGGFDSPTVAYSVLVVAKVEKGKSKKLKSVKELLGITIMERSSFEKNPIDFLEAKGYKEVKKDLIIKLPKYSLFELENGRKRMLASAGELQKGNELALPSKYVNFLYLASHYEKLKGSPEDNEQKQLFVEQHKHYLDEIIEQISEFSKRVILADANLDKVLSAYNKHRDKPIREQAENIIHLFTLTNLGAPAAFKYFDTTIDRKRYTSTKEVLDATLIHQSITGLYETRIDLSQLGGDGGPAPGSSEAAAKGGTLNIEDEYRLHETSKEPDVSLGSTWLSDFPQAWAETGGMGLAVRQAPLIIPLKATSTPVSIKQYPMSQEARLGIKPHIQRLLDQGILVPCQSPWNTPLLPVKKPGTNDYRPVQDLREVNKRVEDIHPTVPNPYNLLSGLPPSHQWYTVLDLKDAFFCLRLHPTSQPLFAFEWRDPEMGISGQLTWTRLPQGFKNSPTLFDEALHRDLAGFRIQHPDLILLQYVDDLLLAATSELDCQQGTRALLQTLGDLGYRASAKKAQICQKQVKYLGYLLKEGQRWLTEARKETVMGQPIPKTPRQLREFLGTAGFCRLWIPGFAEMAAPLYPLTKTGTLFNWGPDQQKAFQEIKQALLTAPALGLPDLTKPFELFVDEKQGYAKGVLTQKLGPWRRPVAYLSKKLDPVAAGWPPCLRMVAAIAVLTKDAGKLTMGQPLVILAPHAVEALVKQPPDRWLSNARMTHYQALLLDTDRVQFGPVVALNPATLLPLPEEGLQHDCLDILAEAHGTRSDLMDQPLPDADHTWYTDGSSFLQEGQRKAGAAVTTETEVIWARALPAGTSAQRAELIALTQALKMAEGKKLNVYTDSRYAFATAHIHGEIYRRRGLLTSEGKEIKNKDEILALLKALFLPKRLSIIHCPGHQKGNSAEARGNRMADQAAREVATRETPETSTLLAGKRTADGSEFEKRTADGSEFESPKKKAKVE

SEQ ID NO: 7638 - protein, 2096 aa, synthetic construct
MPAAKRVKLDGGDKKYSIGLDIGTNSVGWAVITDEYKVPSKKFKVLGNTDRHSIKKNLIGALLFDSGETAEATRLKRTARRRYTRRKNRICYLQEIFSNEMAKVDDSFFHRLEESFLVEEDKKHERHPIFGNIVDEVAYHEKYPTIYHLRKKLVDSTDKADLRLIYLALAHMIKFRGHFLIEGDLNPDNSDVDKLFIQLVQTYNQLFEENPINASGVDAKAILSARLSKSRRLENLIAQLPGEKKNGLFGNLIALSLGLTPNFKSNFDLAEDAKLQLSKDTYDDDLDNLLAQIGDQYADLFLAAKNLSDAILLSDILRVNTEITKAPLSASMIKRYDEHHQDLTLLKALVRQQLPEKYKEIFFDQSKNGYAGYIDGGASQEEFYKFIKPILEKMDGTEELLVKLNREDLLRKQRTFDNGSIPHQIHLGELHAILRRQEDFYPFLKDNREKIEKILTFRIPYYVGPLARGNSRFAWMTRKSEETITPWNFEEVVDKGASAQSFIERMTNFDKNLPNEKVLPKHSLLYEYFTVYNELTKVKYVTEGMRKPAFLSGEQKKAIVDLLFKTNRKVTVKQLKEDYFKKIECFDSVEISGVEDRFNASLGTYHDLLKIIKDKDFLDNEENEDILEDIVLTLTLFEDREMIEERLKTYAHLFDDKVMKQLKRRRYTGWGRLSRKLINGIRDKQSGKTILDFLKSDGFANRNFMQLIHDDSLTFKEDIQKAQVSGQGDSLHEHIANLAGSPAIKKGILQTVKVVDELVKVMGRHKPENIVIEMARENQTTQKGQKNSRERMKRIEEGIKELGSQILKEHPVENTQLQNEKLYLYYLQNGRDMYVDQELDINRLSDYDVDHIVPQSFLKDDSIDNKVLTRSDKARGKSDNVPSEEVVKKMKNYWRQLLNAKLITQRKFDNLTKAERGGLSELDKAGFIKRQLVETRQITKHVAQILDSRMNTKYDENDKLIREVKVITLKSKLVSDFRKDFQFYKVREINNYHHAHDAYLNAVVGTALIKKYPKLESEFVYGDYKVYDVRKMIAKSEQEIGKATAKYFFYSNIMNFFKTEITLANGEIRKRPLIETNGETGEIVWDKGRDFATVRKVLSMPQVNIVKKTEVQTGGFSKESILPKRNSDKLIARKKDWDPKKYGGFDSPTVAYSVLVVAKVEKGKSKKLKSVKELLGITIMERSSFEKNPIDFLEAKGYKEVKKDLIIKLPKYSLFELENGRKRMLASAGELQKGNELALPSKYVNFLYLASHYEKLKGSPEDNEQKQLFVEQHKHYLDEIIEQISEFSKRVILADANLDKVLSAYNKHRDKPIREQAENIIHLFTLTNLGAPAAFKYFDTTIDRKRYTSTKEVLDATLIHQSITGLYETRIDLSQLGGDGGPAPGSSEAAAKGGTLNIEDEHRLHETSKEPDVSLGSTWLSDFPQAWAETGGMGLAVRQAPLIIPLKATSTPVSIKQYPMSQEARLGIKPHIQRLLDQGILVPCQSPWNTPLLPVKKPGTNDYRPVQDLREVNKRVEDIHPTVPNPYNLLSGLPPSHQWYTVLDLKDAFFCLRLHPTSQPLFAFEWRDPEMGISGQLTWTRLPQGFKNSPTLFDEALHRDLADFRIQHPDLILLQYVDDLLLAATSELDCQQGTRALLQTLGNLGYRASAKKAQICQKQVKYLGYLLKEGQRWLTEARKETVMGQPTPKTPRQLREFLGTAGFCRLWIPGFAEMAAPLYPLTKTGTLFNWGPDQQKAYQEIKQALLTAPALGLPDLTKPFELFVDEKQGYAKGVLTQKLGPWRRPVAYLSKKLDPVAAGWPPCLRMVAAIAVLTKDAGKLTMGQPLVILAPHAVEALVKQPPDRWLSNARMTHYQALLLDTDRVQFGPVVALNPATLLPLPEEGLQHNCLDILAEAHGTRPDLTDQPLPDADHTWYTDGSSLLQEGQRKAGAAVTTETEVIWAKALPAGTSAQRAELIALTQALKMAEGKKLNVYTDSRYAFATAHIHGEIYRRRGLLTSEGKEIKNKDEILALLKALFLPKRLSIIHCPGHQKGHSAEARGNRMADQAARKAAITETPDTSTLLAGKRTADGSEFEKRTADGSEFESPKKKAKVE

SEQ ID NO: 7639 - protein, 2096 aa, synthetic construct
MPAAKRVKLDGGDKKYSIGLDIGTNSVGWAVITDEYKVPSKKFKVLGNTDRHSIKKNLIGALLFDSGETAEATRLKRTARRRYTRRKNRICYLQEIFSNEMAKVDDSFFHRLEESFLVEEDKKHERHPIFGNIVDEVAYHEKYPTIYHLRKKLVDSTDKADLRLIYLALAHMIKFRGHFLIEGDLNPDNSDVDKLFIQLVQTYNQLFEENPINASGVDAKAILSARLSKSRRLENLIAQLPGEKKNGLFGNLIALSLGLTPNFKSNFDLAEDAKLQLSKDTYDDDLDNLLAQIGDQYADLFLAAKNLSDAILLSDILRVNTEITKAPLSASMIKRYDEHHQDLTLLKALVRQQLPEKYKEIFFDQSKNGYAGYIDGGASQEEFYKFIKPILEKMDGTEELLVKLNREDLLRKQRTFDNGSIPHQIHLGELHAILRRQEDFYPFLKDNREKIEKILTFRIPYYVGPLARGNSRFAWMTRKSEETITPWNFEEVVDKGASAQSFIERMTNFDKNLPNEKVLPKHSLLYEYFTVYNELTKVKYVTEGMRKPAFLSGEQKKAIVDLLFKTNRKVTVKQLKEDYFKKIECFDSVEISGVEDRFNASLGTYHDLLKIIKDKDFLDNEENEDILEDIVLTLTLFEDREMIEERLKTYAHLFDDKVMKQLKRRRYTGWGRLSRKLINGIRDKQSGKTILDFLKSDGFANRNFMQLIHDDSLTFKEDIQKAQVSGQGDSLHEHIANLAGSPAIKKGILQTVKVVDELVKVMGRHKPENIVIEMARENQTTQKGQKNSRERMKRIEEGIKELGSQILKEHPVENTQLQNEKLYLYYLQNGRDMYVDQELDINRLSDYDVDHIVPQSFLKDDSIDNKVLTRSDKARGKSDNVPSEEVVKKMKNYWRQLLNAKLITQRKFDNLTKAERGGLSELDKAGFIKRQLVETRQITKHVAQILDSRMNTKYDENDKLIREVKVITLKSKLVSDFRKDFQFYKVREINNYHHAHDAYLNAVVGTALIKKYPKLESEFVYGDYKVYDVRKMIAKSEQEIGKATAKYFFYSNIMNFFKTEITLANGEIRKRPLIETNGETGEIVWDKGRDFATVRKVLSMPQVNIVKKTEVQTGGFSKESILPKRNSDKLIARKKDWDPKKYGGFDSPTVAYSVLVVAKVEKGKSKKLKSVKELLGITIMERSSFEKNPIDFLEAKGYKEVKKDLIIKLPKYSLFELENGRKRMLASAGELQKGNELALPSKYVNFLYLASHYEKLKGSPEDNEQKQLFVEQHKHYLDEIIEQISEFSKRVILADANLDKVLSAYNKHRDKPIREQAENIIHLFTLTNLGAPAAFKYFDTTIDRKRYTSTKEVLDATLIHQSITGLYETRIDLSQLGGDGGPAPGSSEAAAKGGTLNIEDEYRLHETSKEPDVPLGSTWLSDFPQAWAETGGMGLAVRQAPLIIPLKATSTPVSIKQYPMSQEARLGIKPHIQRLLDQGILVPCQSPWNTPLLPVKKPGTNDYRPVQDLREVNKRVEDIHPTVPNPYNLLSGLPPSHQWYTVLDLKDAFFCLRLHPTSQPLFAFEWRDPEMGISGQLTWTRLPQGFKNSPTLFNEALHRDLADFRIQHPDLILLQYVDDLLLAATSEQDCQRGTRALLQTLGNLGYRASAKKAQICQKQVKYLGYLLKEGQRWLTEARKETVMGQPTPKTPRQLREFLGKAGFCRLFIPGFAEMAAPLYPLTKPGTLFNWGPDQQKAYQEIKQALLTAPALGLPDLTKPFELFVDEKQGYAKGVLTQKLGPWRRPVAYLSKKLDPVAAGWPPCLRMVAAIAVLTKDAGKLTMGQPLVILAPHAVEALVKQPPDRWLSNARMTHYQAMLLDTDRVQFGPVVALNPATLLPLPEKEAPHDCLEILAETHGTRPDLTDQPIPDADYTWYTDGSSFLQEGQRRAGAAVTTETEVIWARALPAGTSAQRAELIALTQALKMAEGKKLNVYTDSRYAFATAHVHGEIYRRRGWLTSEGREIKNKNEILALLKALFLPKRLSIIHCPGHQKGNSAEARGNRMADQAAREAAMKAVLETSTLLAGKRTADGSEFEKRTADGSEFESPKKKAKVE

SEQ ID NO: 7640 - protein, 2102 aa, synthetic construct
MPAAKRVKLDGGDKKYSIGLDIGTNSVGWAVITDEYKVPSKKFKVLGNTDRHSIKKNLIGALLFDSGETAEATRLKRTARRRYTRRKNRICYLQEIFSNEMAKVDDSFFHRLEESFLVEEDKKHERHPIFGNIVDEVAYHEKYPTIYHLRKKLVDSTDKADLRLIYLALAHMIKFRGHFLIEGDLNPDNSDVDKLFIQLVQTYNQLFEENPINASGVDAKAILSARLSKSRRLENLIAQLPGEKKNGLFGNLIALSLGLTPNFKSNFDLAEDAKLQLSKDTYDDDLDNLLAQIGDQYADLFLAAKNLSDAILLSDILRVNTEITKAPLSASMIKRYDEHHQDLTLLKALVRQQLPEKYKEIFFDQSKNGYAGYIDGGASQEEFYKFIKPILEKMDGTEELLVKLNREDLLRKQRTFDNGSIPHQIHLGELHAILRRQEDFYPFLKDNREKIEKILTFRIPYYVGPLARGNSRFAWMTRKSEETITPWNFEEVVDKGASAQSFIERMTNFDKNLPNEKVLPKHSLLYEYFTVYNELTKVKYVTEGMRKPAFLSGEQKKAIVDLLFKTNRKVTVKQLKEDYFKKIECFDSVEISGVEDRFNASLGTYHDLLKIIKDKDFLDNEENEDILEDIVLTLTLFEDREMIEERLKTYAHLFDDKVMKQLKRRRYTGWGRLSRKLINGIRDKQSGKTILDFLKSDGFANRNFMQLIHDDSLTFKEDIQKAQVSGQGDSLHEHIANLAGSPAIKKGILQTVKVVDELVKVMGRHKPENIVIEMARENQTTQKGQKNSRERMKRIEEGIKELGSQILKEHPVENTQLQNEKLYLYYLQNGRDMYVDQELDINRLSDYDVDHIVPQSFLKDDSIDNKVLTRSDKARGKSDNVPSEEVVKKMKNYWRQLLNAKLITQRKFDNLTKAERGGLSELDKAGFIKRQLVETRQITKHVAQILDSRMNTKYDENDKLIREVKVITLKSKLVSDFRKDFQFYKVREINNYHHAHDAYLNAVVGTALIKKYPKLESEFVYGDYKVYDVRKMIAKSEQEIGKATAKYFFYSNIMNFFKTEITLANGEIRKRPLIETNGETGEIVWDKGRDFATVRKVLSMPQVNIVKKTEVQTGGFSKESILPKRNSDKLIARKKDWDPKKYGGFDSPTVAYSVLVVAKVEKGKSKKLKSVKELLGITIMERSSFEKNPIDFLEAKGYKEVKKDLIIKLPKYSLFELENGRKRMLASAGELQKGNELALPSKYVNFLYLASHYEKLKGSPEDNEQKQLFVEQHKHYLDEIIEQISEFSKRVILADANLDKVLSAYNKHRDKPIREQAENIIHLFTLTNLGAPAAFKYFDTTIDRKRYTSTKEVLDATLIHQSITGLYETRIDLSQLGGDGGPAPEAAAKGSSGGTVSLQDEHRLFDIPVTTSLPDVWLQDFPQAWAETGGLGRAKCQAPIIIDLKPTAVPVSIKQYPMSLEAHMGIRQHIIKFLELGVLRPCRSPWNTPLLPVKKPGTQDYRPVQDLREINKRTVDIHPTVPNPYNLLSTLKPDYSWYTVLDLKDAFFCLPLAPQSQELFAFEWKDPERGISGQLTWTRLPQGFKNSPTLFDEALHRDLTDFRTQHPEVTLLQYVDDLLLAAPTKKACTQGTRHLLQELGEKGYRASAKKAQICQTKVTYLGYILSEGKRWLTPGRIETVARIPPPRNPREVREFLGTAGFCRLWIPGFAELAAPLYALTKESTPFTWQTEHQLAFEALKKALLSAPALGLPDTSKPFTLFLDERQGIAKGVLTQKLGPWKRPVAYLSKKLDPVAAGWPPCLRIMAATAMLVKDSAKLTLGQPLTVITPHTLEAIVRQPPDRWITNARLTHYQALLLDTDRVQFGPPVTLNPATLLPVPENQPSPHDCRQVLAETHGTREDLKDQELPDADHTWYTDGSSYLDSGTRRAGAAVVDGHNTIWAQSLPPGTSAQKAELIALTKALELSKGKKANIYTDSRYAFATAHTHGSIYERRGLLTSEGKEIKNKAEIIALLKALFLPQEVAIIHCPGHQKGQDPVAVGNRQADRVARQAAMAEVLTLATEPDNTSHITAGKRTADGSEFEKRTADGSEFESPKKKAKVE

SEQ ID NO: 7641 - protein, 2095 aa, synthetic construct
MPAAKRVKLDGGDKKYSIGLDIGTNSVGWAVITDEYKVPSKKFKVLGNTDRHSIKKNLIGALLFDSGETAEATRLKRTARRRYTRRKNRICYLQEIFSNEMAKVDDSFFHRLEESFLVEEDKKHERHPIFGNIVDEVAYHEKYPTIYHLRKKLVDSTDKADLRLIYLALAHMIKFRGHFLIEGDLNPDNSDVDKLFIQLVQTYNQLFEENPINASGVDAKAILSARLSKSRRLENLIAQLPGEKKNGLFGNLIALSLGLTPNFKSNFDLAEDAKLQLSKDTYDDDLDNLLAQIGDQYADLFLAAKNLSDAILLSDILRVNTEITKAPLSASMIKRYDEHHQDLTLLKALVRQQLPEKYKEIFFDQSKNGYAGYIDGGASQEEFYKFIKPILEKMDGTEELLVKLNREDLLRKQRTFDNGSIPHQIHLGELHAILRRQEDFYPFLKDNREKIEKILTFRIPYYVGPLARGNSRFAWMTRKSEETITPWNFEEVVDKGASAQSFIERMTNFDKNLPNEKVLPKHSLLYEYFTVYNELTKVKYVTEGMRKPAFLSGEQKKAIVDLLFKTNRKVTVKQLKEDYFKKIECFDSVEISGVEDRFNASLGTYHDLLKIIKDKDFLDNEENEDILEDIVLTLTLFEDREMIEERLKTYAHLFDDKVMKQLKRRRYTGWGRLSRKLINGIRDKQSGKTILDFLKSDGFANRNFMQLIHDDSLTFKEDIQKAQVSGQGDSLHEHIANLAGSPAIKKGILQTVKVVDELVKVMGRHKPENIVIEMARENQTTQKGQKNSRERMKRIEEGIKELGSQILKEHPVENTQLQNEKLYLYYLQNGRDMYVDQELDINRLSDYDVDHIVPQSFLKDDSIDNKVLTRSDKARGKSDNVPSEEVVKKMKNYWRQLLNAKLITQRKFDNLTKAERGGLSELDKAGFIKRQLVETRQITKHVAQILDSRMNTKYDENDKLIREVKVITLKSKLVSDFRKDFQFYKVREINNYHHAHDAYLNAVVGTALIKKYPKLESEFVYGDYKVYDVRKMIAKSEQEIGKATAKYFFYSNIMNFFKTEITLANGEIRKRPLIETNGETGEIVWDKGRDFATVRKVLSMPQVNIVKKTEVQTGGFSKESILPKRNSDKLIARKKDWDPKKYGGFDSPTVAYSVLVVAKVEKGKSKKLKSVKELLGITIMERSSFEKNPIDFLEAKGYKEVKKDLIIKLPKYSLFELENGRKRMLASAGELQKGNELALPSKYVNFLYLASHYEKLKGSPEDNEQKQLFVEQHKHYLDEIIEQISEFSKRVILADANLDKVLSAYNKHRDKPIREQAENIIHLFTLTNLGAPAAFKYFDTTIDRKRYTSTKEVLDATLIHQSITGLYETRIDLSQLGGDGGPAPEAAAKGSSGGTLQLEEEYRLFEPESTQKQEMDIWLKNFPQAWAETGGMGTAHCQAPVLIQLKATATPISIRQYPMPHEAYQGIKPHIRRMLDQGILKPCQSPWNTPLLPVKKPGTEDYRPVQDLREVNKRVEDIHPTVPNPYNLLSTLPPSHPWYTVLDLKDAFFCLRLHSESQLLFAFEWRDPEIGLSGQLTWTRLPQGFKNSPTLFNEALHSDLADFRVRYPALVLLQYVDDLLLAAATRTECLEGTKALLETLGNKGYRASAKKAQICLQEVTYLGYSLKDGQRWLTKARKEAILSIPVPKNSRQVREFLGTAGYCRLWIPGFAELAAPLYPLTRPGTLFQWGTEQQLAFEDIKKALLSSPALGLPDITKPFELFIDENSGFAKGVLVQKLGPWKRPVAYLSKKLDTVASGWPPCLRMVAAIAILVKDAGKLTLGQPLTILTSHPVEALVRQPPNKWLSNARMTHYQAMLLDAERVHFGPTVSLNPATLLPLPSGGNHHDCLQILAETHGTRPDLTDQPLPDADLTWYTDGSSFIRNGEREAGAAVTTESEVIWAAPLPPGTSAQRAELIALTQALKMAEGKKLTVYTDSRYAFATTHVHGEIYRRRGWLTSEGKEIKNKNEILALLEALFLPKRLSIIHCPGHQKGDSPQAKGNRLADDTAKKAATETHSSLTVLPAGKRTADGSEFEKRTADGSEFESPKKKAKVE

SEQ ID NO: 7642 - protein, 2176 aa, synthetic construct
MPAAKRVKLDGGDKKYSIGLDIGTNSVGWAVITDEYKVPSKKFKVLGNTDRHSIKKNLIGALLFDSGETAEATRLKRTARRRYTRRKNRICYLQEIFSNEMAKVDDSFFHRLEESFLVEEDKKHERHPIFGNIVDEVAYHEKYPTIYHLRKKLVDSTDKADLRLIYLALAHMIKFRGHFLIEGDLNPDNSDVDKLFIQLVQTYNQLFEENPINASGVDAKAILSARLSKSRRLENLIAQLPGEKKNGLFGNLIALSLGLTPNFKSNFDLAEDAKLQLSKDTYDDDLDNLLAQIGDQYADLFLAAKNLSDAILLSDILRVNTEITKAPLSASMIKRYDEHHQDLTLLKALVRQQLPEKYKEIFFDQSKNGYAGYIDGGASQEEFYKFIKPILEKMDGTEELLVKLNREDLLRKQRTFDNGSIPHQIHLGELHAILRRQEDFYPFLKDNREKIEKILTFRIPYYVGPLARGNSRFAWMTRKSEETITPWNFEEVVDKGASAQSFIERMTNFDKNLPNEKVLPKHSLLYEYFTVYNELTKVKYVTEGMRKPAFLSGEQKKAIVDLLFKTNRKVTVKQLKEDYFKKIECFDSVEISGVEDRFNASLGTYHDLLKIIKDKDFLDNEENEDILEDIVLTLTLFEDREMIEERLKTYAHLFDDKVMKQLKRRRYTGWGRLSRKLINGIRDKQSGKTILDFLKSDGFANRNFMQLIHDDSLTFKEDIQKAQVSGQGDSLHEHIANLAGSPAIKKGILQTVKVVDELVKVMGRHKPENIVIEMARENQTTQKGQKNSRERMKRIEEGIKELGSQILKEHPVENTQLQNEKLYLYYLQNGRDMYVDQELDINRLSDYDVDHIVPQSFLKDDSIDNKVLTRSDKARGKSDNVPSEEVVKKMKNYWRQLLNAKLITQRKFDNLTKAERGGLSELDKAGFIKRQLVETRQITKHVAQILDSRMNTKYDENDKLIREVKVITLKSKLVSDFRKDFQFYKVREINNYHHAHDAYLNAVVGTALIKKYPKLESEFVYGDYKVYDVRKMIAKSEQEIGKATAKYFFYSNIMNFFKTEITLANGEIRKRPLIETNGETGEIVWDKGRDFATVRKVLSMPQVNIVKKTEVQTGGFSKESILPKRNSDKLIARKKDWDPKKYGGFDSPTVAYSVLVVAKVEKGKSKKLKSVKELLGITIMERSSFEKNPIDFLEAKGYKEVKKDLIIKLPKYSLFELENGRKRMLASAGELQKGNELALPSKYVNFLYLASHYEKLKGSPEDNEQKQLFVEQHKHYLDEIIEQISEFSKRVILADANLDKVLSAYNKHRDKPIREQAENIIHLFTLTNLGAPAAFKYFDTTIDRKRYTSTKEVLDATLIHQSITGLYETRIDLSQLGGDGGPAPEAAAKGSSGGMNPLQLLQPLPAEIKGTKLLAHWNSGATITCIPESFLEDEQPIKKTLIKTIHGEKQQNVYYVTFKVKGRKVEAEVIASPYEYILLSPTDVPWLTQQPLQLTILVPLQEYQEKILSKTALPEDQKQQLKTLFVKYDNLWQHWENQVGHRKIRPHNIATGDYPPRPQKQYPINPKAKPSIQIVIDDLLKQGVLTPQNSTMNTPVYPVPKPDGRWRMVLDYREVNKTIPLTAAQNQHSAGILATIVRQKYKTTLDLANGFWAHPITPESYWLTAFTWQGKQYCWTRLPQGFLNSPALFNADVVDLLKEIPNVQVYVDDIYLSHDDPKEHVQQLEKVFQILLQAGYVVSLKKSEIGQKTVEFLGFNITKEGRGLTDTFKTKLLNITPPKDLKQLQSILGLLNFARNFIPNFAELVQPLYNLIAPAKGKYIEWSEENTKQLNMVIEALNTASNLEERLPEQRLVIKVNTSPSAGYVRYYNETGKKPIMYLNYVFSKAELKFSMLEKLLTTMHKALIKAMDLAMGQEILVYSPIVSMTKIQKTPLPERKALPIRWITWMTYLEDPRIQFHYDKTLPELKHIPDVYTSSQSPVKHPSQYEGVFYTDGSAIKSPDPTKSNNAGMGIVHATYKPEYQVLNQWSIPLGNHTAQMAEIAAVEFACKKALKIPGPVLVITDSFYVAESANKELPYWKSNGFVNNKKKPLKHISKWKSIAECLSMKPDITIQHEKGISLQIPVFILKGNALADKLATQGSYVVNAGKRTADGSEFEKRTADGSEFESPKKKAKVE

SEQ ID NO: 7643 - protein, 2096 aa, synthetic construct
MPAAKRVKLDGGDKKYSIGLDIGTNSVGWAVITDEYKVPSKKFKVLGNTDRHSIKKNLIGALLFDSGETAEATRLKRTARRRYTRRKNRICYLQEIFSNEMAKVDDSFFHRLEESFLVEEDKKHERHPIFGNIVDEVAYHEKYPTIYHLRKKLVDSTDKADLRLIYLALAHMIKFRGHFLIEGDLNPDNSDVDKLFIQLVQTYNQLFEENPINASGVDAKAILSARLSKSRRLENLIAQLPGEKKNGLFGNLIALSLGLTPNFKSNFDLAEDAKLQLSKDTYDDDLDNLLAQIGDQYADLFLAAKNLSDAILLSDILRVNTEITKAPLSASMIKRYDEHHQDLTLLKALVRQQLPEKYKEIFFDQSKNGYAGYIDGGASQEEFYKFIKPILEKMDGTEELLVKLNREDLLRKQRTFDNGSIPHQIHLGELHAILRRQEDFYPFLKDNREKIEKILTFRIPYYVGPLARGNSRFAWMTRKSEETITPWNFEEVVDKGASAQSFIERMTNFDKNLPNEKVLPKHSLLYEYFTVYNELTKVKYVTEGMRKPAFLSGEQKKAIVDLLFKTNRKVTVKQLKEDYFKKIECFDSVEISGVEDRFNASLGTYHDLLKIIKDKDFLDNEENEDILEDIVLTLTLFEDREMIEERLKTYAHLFDDKVMKQLKRRRYTGWGRLSRKLINGIRDKQSGKTILDFLKSDGFANRNFMQLIHDDSLTFKEDIQKAQVSGQGDSLHEHIANLAGSPAIKKGILQTVKVVDELVKVMGRHKPENIVIEMARENQTTQKGQKNSRERMKRIEEGIKELGSQILKEHPVENTQLQNEKLYLYYLQNGRDMYVDQELDINRLSDYDVDHIVPQSFLKDDSIDNKVLTRSDKARGKSDNVPSEEVVKKMKNYWRQLLNAKLITQRKFDNLTKAERGGLSELDKAGFIKRQLVETRQITKHVAQILDSRMNTKYDENDKLIREVKVITLKSKLVSDFRKDFQFYKVREINNYHHAHDAYLNAVVGTALIKKYPKLESEFVYGDYKVYDVRKMIAKSEQEIGKATAKYFFYSNIMNFFKTEITLANGEIRKRPLIETNGETGEIVWDKGRDFATVRKVLSMPQVNIVKKTEVQTGGFSKESILPKRNSDKLIARKKDWDPKKYGGFDSPTVAYSVLVVAKVEKGKSKKLKSVKELLGITIMERSSFEKNPIDFLEAKGYKEVKKDLIIKLPKYSLFELENGRKRMLASAGELQKGNELALPSKYVNFLYLASHYEKLKGSPEDNEQKQLFVEQHKHYLDEIIEQISEFSKRVILADANLDKVLSAYNKHRDKPIREQAENIIHLFTLTNLGAPAAFKYFDTTIDRKRYTSTKEVLDATLIHQSITGLYETRIDLSQLGGDGGPAPEAAAKGSSGGTLGIEDEYRLHETSTEPDVSLGSTWLSDFPQAWAETGGMGLAVRQAPLIIPLKATSTPVSIQQYPMSHEARLGIKPHIQRLLDQGILVPCQSPWNTPLLPVKKPGTNDYRPVQDLREVNKRVEDIHPTVPNPYNLLSGLPPSHQWYTVLDLKDAFFCLRLHPTSQPLFAFEWRDPGMGISGQLTWTRLPQGFKNSPTLFNEALHRDLADFRIQHPDLILLQYVDDILLAATSELDCQQGTRALLQTLGDLGYRASAKKAQICQKQVKYLGYLLREGQRWLTEARKETVMGQPVPKTPRQLREFLGTAGFCRLWIPGFAEMAAPLYPLTKPGTLFSWGPDQQKAYQEIKQALLTAPALGLPDLTKPFELFVDEKQGYAKGVLTQKLGPWRRPVAYLSKKLDPVAAGWPPCLRMVAAIAVLTKDAGKLTMGQPLVILAPHAVEALVKQPPDRWLSNARMTHYQAMLLDTDRVQFGPVVALNPATLLPLPEEGAPHDCLEILAETHGTRPDLTDQPIPDADHTWYTDGSSFLQEGQRKAGAAVTTETEVIWAGALPAGTSAQRAELIALTQALKMAEGKRLNVYTDSRYAFATAHIHGEIYRRRGWLTSEGREIKNKSEILALLKALFLPKRLSIIHCLGHQKGDSAEARGNRLADQAAREAAIKTPPDTSTLLAGKRTADGSEFEKRTADGSEFESPKKKAKVE

SEQ ID NO: 7644 - protein, 2096 aa, synthetic construct; identical to SEQ ID NO: 7643

SEQ ID NO: 7645 - protein, 2096 aa, synthetic construct
MPAAKRVKLDGGDKKYSIGLDIGTNSVGWAVITDEYKVPSKKFKVLGNTDRHSIKKNLIGALLFDSGETAEATRLKRTARRRYTRRKNRICYLQEIFSNEMAKVDDSFFHRLEESFLVEEDKKHERHPIFGNIVDEVAYHEKYPTIYHLRKKLVDSTDKADLRLIYLALAHMIKFRGHFLIEGDLNPDNSDVDKLFIQLVQTYNQLFEENPINASGVDAKAILSARLSKSRRLENLIAQLPGEKKNGLFGNLIALSLGLTPNFKSNFDLAEDAKLQLSKDTYDDDLDNLLAQIGDQYADLFLAAKNLSDAILLSDILRVNTEITKAPLSASMIKRYDEHHQDLTLLKALVRQQLPEKYKEIFFDQSKNGYAGYIDGGASQEEFYKFIKPILEKMDGTEELLVKLNREDLLRKQRTFDNGSIPHQIHLGELHAILRRQEDFYPFLKDNREKIEKILTFRIPYYVGPLARGNSRFAWMTRKSEETITPWNFEEVVDKGASAQSFIERMTNFDKNLPNEKVLPKHSLLYEYFTVYNELTKVKYVTEGMRKPAFLSGEQKKAIVDLLFKTNRKVTVKQLKEDYFKKIECFDSVEISGVEDRFNASLGTYHDLLKIIKDKDFLDNEENEDILEDIVLTLTLFEDREMIEERLKTYAHLFDDKVMKQLKRRRYTGWGRLSRKLINGIRDKQSGKTILDFLKSDGFANRNFMQLIHDDSLTFKEDIQKAQVSGQGDSLHEHIANLAGSPAIKKGILQTVKVVDELVKVMGRHKPENIVIEMARENQTTQKGQKNSRERMKRIEEGIKELGSQILKEHPVENTQLQNEKLYLYYLQNGRDMYVDQELDINRLSDYDVDHIVPQSFLKDDSIDNKVLTRSDKARGKSDNVPSEEVVKKMKNYWRQLLNAKLITQRKFDNLTKAERGGLSELDKAGFIKRQLVETRQITKHVAQILDSRMNTKYDENDKLIREVKVITLKSKLVSDFRKDFQFYKVREINNYHHAHDAYLNAVVGTALIKKYPKLESEFVYGDYKVYDVRKMIAKSEQEIGKATAKYFFYSNIMNFFKTEITLANGEIRKRPLIETNGETGEIVWDKGRDFATVRKVLSMPQVNIVKKTEVQTGGFSKESILPKRNSDKLIARKKDWDPKKYGGFDSPTVAYSVLVVAKVEKGKSKKLKSVKELLGITIMERSSFEKNPIDFLEAKGYKEVKKDLIIKLPKYSLFELENGRKRMLASAGELQKGNELALPSKYVNFLYLASHYEKLKGSPEDNEQKQLFVEQHKHYLDEIIEQISEFSKRVILADANLDKVLSAYNKHRDKPIREQAENIIHLFTLTNLGAPAAFKYFDTTIDRKRYTSTKEVLDATLIHQSITGLYETRIDLSQLGGDGGPAPEAAAKGSSGGTLNIEDEYRLHETSKGPDVPLGSTWLSDFPQAWAETGGMGLAVRQAPLIIPLKATSTPVSIKQYPMSQEARLGIKPHIQRLLDQGILVPCQSPWNTPLLPVKKPGTNDYRPVQDLREVNKRVEDIHPTVPNPYNLLSGLPPSHQWYTVLDLKDAFFCLRLHPTSQSLFAFEWRDPEMGISGQLTWTRLPQGFKNSPTLFDEALHRDLADFRIQHPDLILLQYVDDLLLAATSELDCQQGTRALLQTLGDLGYRASAKKAQICQKQVKYLGYLLKEGQRWLTEARKETVMGQPTPKTPRQLREFLGTAGFCRLWIPGFAEMAAPLYPLTKTGTLFEWGPDQQKAYQEIKQALLTAPALGLPDLTKPFELFVDEKQGYAKGVLTQKLGPWRRPVAYLSKKLDPVAAGWPPCLRMVAAIAVLTKDAGKLTMGQPLVILAPHAVEALVKQPPDRWLSNARMTHYQALLLDTDRVQFGPIVALNPATLLPLPEEGLQHDCLDILAEAHGTRPDLTDQPLPDADHTWYTDGSSFLQEGQRKAGAAVTTETEVVWAKALPAGTSAQRAELIALTQALKMAEGKKLNVYTDSRYAFATAHIHGEIYRRRGLLTSEGKEIKNKDEILALLKALFLPKRLSIIHCPGHQKGNRAEARGNRMADQAAREVATRETPETSTLLAGKRTADGSEFEKRTADGSEFESPKKKAKVE

SEQ ID NO: 7646 - protein, 2090 aa, synthetic construct
MPAAKRVKLDGGDKKYSIGLDIGTNSVGWAVITDEYKVPSKKFKVLGNTDRHSIKKNLIGALLFDSGETAEATRLKRTARRRYTRRKNRICYLQEIFSNEMAKVDDSFFHRLEESFLVEEDKKHERHPIFGNIVDEVAYHEKYPTIYHLRKKLVDSTDKADLRLIYLALAHMIKFRGHFLIEGDLNPDNSDVDKLFIQLVQTYNQLFEENPINASGVDAKAILSARLSKSRRLENLIAQLPGEKKNGLFGNLIALSLGLTPNFKSNFDLAEDAKLQLSKDTYDDDLDNLLAQIGDQYADLFLAAKNLSDAILLSDILRVNTEITKAPLSASMIKRYDEHHQDLTLLKALVRQQLPEKYKEIFFDQSKNGYAGYIDGGASQEEFYKFIKPILEKMDGTEELLVKLNREDLLRKQRTFDNGSIPHQIHLGELHAILRRQEDFYPFLKDNREKIEKILTFRIPYYVGPLARGNSRFAWMTRKSEETITPWNFEEVVDKGASAQSFIERMTNFDKNLPNEKVLPKHSLLYEYFTVYNELTKVKYVTEGMRKPAFLSGEQKKAIVDLLFKTNRKVTVKQLKEDYFKKIECFDSVEISGVEDRFNASLGTYHDLLKIIKDKDFLDNEENEDILEDIVLTLTLFEDREMIEERLKTYAHLFDDKVMKQLKRRRYTGWGRLSRKLINGIRDKQSGKTILDFLKSDGFANRNFMQLIHDDSLTFKEDIQKAQVSGQGDSLHEHIANLAGSPAIKKGILQTVKVVDELVKVMGRHKPENIVIEMARENQTTQKGQKNSRERMKRIEEGIKELGSQILKEHPVENTQLQNEKLYLYYLQNGRDMYVDQELDINRLSDYDVDHIVPQSFLKDDSIDNKVLTRSDKARGKSDNVPSEEVVKKMKNYWRQLLNAKLITQRKFDNLTKAERGGLSELDKAGFIKRQLVETRQITKHVAQILDSRMNTKYDENDKLIREVKVITLKSKLVSDFRKDFQFYKVREINNYHHAHDAYLNAVVGTALIKKYPKLESEFVYGDYKVYDVRKMIAKSEQEIGKATAKYFFYSNIMNFFKTEITLANGEIRKRPLIETNGETGEIVWDKGRDFATVRKVLSMPQVNIVKKTEVQTGGFSKESILPKRNSDKLIARKKDWDPKKYGGFDSPTVAYSVLVVAKVEKGKSKKLKSVKELLGITIMERSSFEKNPIDFLEAKGYKEVKKDLIIKLPKYSLFELENGRKRMLASAGELQKGNELALPSKYVNFLYLASHYEKLKGSPEDNEQKQLFVEQHKHYLDEIIEQISEFSKRVILADANLDKVLSAYNKHRDKPIREQAENIIHLFTLTNLGAPAAFKYFDTTIDRKRYTSTKEVLDATLIHQSITGLYETRIDLSQLGGDGGPAPEAAAKGSSGGTLQLDDEYRLYSPLVKPDQNIQFWLEQFPQAWAETAGMGLAKQVPPQVIQLKASATPVSVRQYPLSKEAQEGIRPHVQRLIQQGILVPVQSPWNTPLLPVRKPGTNDYRPVQDLREVNKRVQDIHPTVPNPYNLLCALPPQRSWYTVLDLKDAFFCLRLHPTSQPLFAFEWRDPGTGRTGQLTWTRLPQGFKNSPTIFDEALHRDLANFRIQHPQVTLLQYVDDLLLAGATKQDCLEGTKALLLELSDLGYRASAKKAQICRREVTYLGYSLRDGQRWLTEARKKTVVQIPAPTTAKQVREFLGTAGFCRLWIPGFATLAAPLYPLTKEKGEFSWAPEHQKAFDAIKKALLSAPALALPDVTKPFTLYVDERKGVARGVLTQTLGPWRRPVAYLSKKLDPVASGWPVCLKAIAAVAILVKDADKLTLGQNITVIAPHALENIVRQPPDRWMTNARMTHYQSLLLTERVTFAPPAALNPATLLPEETDEPVTHDCHQLLIEETGVRKDLTDIPLTGEVLTWFTDGSSYVVEGKRMAGAAVVDGTRTIWASSLPEGTSAQKAELMALTQALRLAEGKSINIYTDSRYAFATAHVHGAIYKQRGLLTSAGREIKNKEEILSLLEALHLPKRLAIIHCPGHQKAKDPISRGNQMADRVAKQAAQGVNLLAGKRTADGSEFEKRTADGSEFESPKKKAKVE

SEQ ID NO: 7647 - protein, 2087 aa, synthetic construct
MPAAKRVKLDGGDKKYSIGLDIGTNSVGWAVITDEYKVPSKKFKVLGNTDRHSIKKNLIGALLFDSGETAEATRLKRTARRRYTRRKNRICYLQEIFSNEMAKVDDSFFHRLEESFLVEEDKKHERHPIFGNIVDEVAYHEKYPTIYHLRKKLVDSTDKADLRLIYLALAHMIKFRGHFLIEGDLNPDNSDVDKLFIQLVQTYNQLFEENPINASGVDAKAILSARLSKSRRLENLIAQLPGEKKNGLFGNLIALSLGLTPNFKSNFDLAEDAKLQLSKDTYDDDLDNLLAQIGDQYADLFLAAKNLSDAILLSDILRVNTEITKAPLSASMIKRYDEHHQDLTLLKALVRQQLPEKYKEIFFDQSKNGYAGYIDGGASQEEFYKFIKPILEKMDGTEELLVKLNREDLLRKQRTFDNGSIPHQIHLGELHAILRRQEDFYPFLKDNREKIEKILTFRIPYYVGPLARGNSRFAWMTRKSEETITPWNFEEVVDKGASAQSFIERMTNFDKNLPNEKVLPKHSLLYEYFTVYNELTKVKYVTEGMRKPAFLSGEQKKAIVDLLFKTNRKVTVKQLKEDYFKKIECFDSVEISGVEDRFNASLGTYHDLLKIIKDKDFLDNEENEDILEDIVLTLTLFEDREMIEERLKTYAHLFDDKVMKQLKRRRYTGWGRLSRKLINGIRDKQSGKTILDFLKSDGFANRNFMQLIHDDSLTFKEDIQKAQVSGQGDSLHEHIANLAGSPAIKKGILQTVKVVDELVKVMGRHKPENIVIEMARENQTTQKGQKNSRERMKRIEEGIKELGSQILKEHPVENTQLQNEKLYLYYLQNGRDMYVDQELDINRLSDYDVDHIVPQSFLKDDSIDNKVLTRSDKARGKSDNVPSEEVVKKMKNYWRQLLNAKLITQRKFDNLTKAERGGLSELDKAGFIKRQLVETRQITKHVAQILDSRMNTKYDENDKLIREVKVITLKSKLVSDFRKDFQFYKVREINNYHHAHDAYLNAVVGTALIKKYPKLESEFVYGDYKVYDVRKMIAKSEQEIGKATAKYFFYSNIMNFFKTEITLANGEIRKRPLIETNGETGEIVWDKGRDFATVRKVLSMPQVNIVKKTEVQTGGFSKESILPKRNSDKLIARKKDWDPKKYGGFDSPTVAYSVLVVAKVEKGKSKKLKSVKELLGITIMERSSFEKNPIDFLEAKGYKEVKKDLIIKLPKYSLFELENGRKRMLASAGELQKGNELALPSKYVNFLYLASHYEKLKGSPEDNEQKQLFVEQHKHYLDEIIEQISEFSKRVILADANLDKVLSAYNKHRDKPIREQAENIIHLFTLTNLGAPAAFKYFDTTIDRKRYTSTKEVLDATLIHQSITGLYETRIDLSQLGGDGGPAPEAAAKGSSGGIPWLMKKPLQLTTLVPLQEYEERLLKQTMLTGSYKEKLQSLFLKYDALWQHWENQVGHRRIKPHHIATGTVNPRPQKQYPINPKAKASIQTVINDLLKQGVLIQQNSIMNTPVYPVPKPDGKWRMVLDYREVNKTIPLIAAQNQHSAGILSSIFRGKYKTTLDLSNGFWAHSITPESYWLTAFTWLGQQYCWTRLPQGFLNSPALFNADVVDLLKEVPNVQVYVDDIYISHDDPREHLEQLEKVFSLLLNAGYVVSLKKSEIAQHEVEFLGFNITKEGRGLTETFKQKLLNITPPRDLKQLQSILGLLNFARNFIPNFSELVKPLYNIIATAPGKYITWTTDNSQQLQNIISMLNSAENLEERNPEVRLIMKVNTSPSAGYIRFYNEFAKRPIMYLNYVYTKAEVKFTNTEKLLTTIHKGLIKALDLGMGQEILVYSPIVSMTKIQKTPLPERKALPIRWITWMSYLEDPRIQFHYDKTLPELQQVPTVTDDIIAKIKHPSEFSMVFYTDGSAIKHPNVNKSHNAGMGIAQVQFKPEFTVINTWSIPLGDHTAQLAEVAAVEFACKKALKIDGPVLIVTDSFYVAESVNKELPYWQSNGFFNNKKKPLKHVSKWKSIADCIQLKPDIIIIHEKGHQPTASTFHTEGNNLADKLATQGSYVVNAGKRTADGSEFEKRTADGSEFESPKKKAKVE

SEQ ID NO: 7648 - protein, 2176 aa, synthetic construct
MPAAKRVKLDGGDKKYSIGLDIGTNSVGWAVITDEYKVPSKKFKVLGNTDRHSIKKNLIGALLFDSGETAEATRLKRTARRRYTRRKNRICYLQEIFSNEMAKVDDSFFHRLEESFLVEEDKKHERHPIFGNIVDEVAYHEKYPTIYHLRKKLVDSTDKADLRLIYLALAHMIKFRGHFLIEGDLNPDNSDVDKLFIQLVQTYNQLFEENPINASGVDAKAILSARLSKSRRLENLIAQLPGEKKNGLFGNLIALSLGLTPNFKSNFDLAEDAKLQLSKDTYDDDLDNLLAQIGDQYADLFLAAKNLSDAILLSDILRVNTEITKAPLSASMIKRYDEHHQDLTLLKALVRQQLPEKYKEIFFDQSKNGYAGYIDGGASQEEFYKFIKPILEKMDGTEELLVKLNREDLLRKQRTFDNGSIPHQIHLGELHAILRRQEDFYPFLKDNREKIEKILTFRIPYYVGPLARGNSRFAWMTRKSEETITPWNFEEVVDKGASAQSFIERMTNFDKNLPNEKVLPKHSLLYEYFTVYNELTKVKYVTEGMRKPAFLSGEQKKAIVDLLFKTNRKVTVKQLKEDYFKKIECFDSVEISGVEDRFNASLGTYHDLLKIIKDKDFLDNEENEDILEDIVLTLTLFEDREMIEERLKTYAHLFDDKVMKQLKRRRYTGWGRLSRKLINGIRDKQSGKTILDFLKSDGFANRNFMQLIHDDSLTFKEDIQKAQVSGQGDSLHEHIANLAGSPAIKKGILQTVKVVDELVKVMGRHKPENIVIEMARENQTTQKGQKNSRERMKRIEEGIKELGSQILKEHPVENTQLQNEKLYLYYLQNGRDMYVDQELDINRLSDYDVDHIVPQSFLKDDSIDNKVLTRSDKARGKSDNVPSEEVVKKMKNYWRQLLNAKLITQRKFDNLTKAERGGLSELDKAGFIKRQLVETRQITKHVAQILDSRMNTKYDENDKLIREVKVITLKSKLVSDFRKDFQFYKVREINNYHHAHDAYLNAVVGTALIKKYPKLESEFVYGDYKVYDVRKMIAKSEQEIGKATAKYFFYSNIMNFFKTEITLANGEIRKRPLIETNGETGEIVWDKGRDFATVRKVLSMPQVNIVKKTEVQTGGFSKESILPKRNSDKLIARKKDWDPKKYGGFDSPTVAYSVLVVAKVEKGKSKKLKSVKELLGITIMERSSFEKNPIDFLEAKGYKEVKKDLIIKLPKYSLFELENGRKRMLASAGELQKGNELALPSKYVNFLYLASHYEKLKGSPEDNEQKQLFVEQHKHYLDEIIEQISEFSKRVILADANLDKVLSAYNKHRDKPIREQAENIIHLFTLTNLGAPAAFKYFDTTIDRKRYTSTKEVLDATLIHQSITGLYETRIDLSQLGGDGGPAPEAAAKGSSGGMNPLQLLQPLPAEVKGTKLLAHWNSGATITCIPESFLEDEQPIKQTLIKTIHGEKQQNVYYLTFKVKGRKVEAEVIASPYEYILLSPTDVPWLTQQPLQLTILVPLQEYQDRILNKTALPEEQKQQLKALFTKYDNLWQHWENQVGHRKIRPHNIATGDYPPRPQKQYPINPKAKPSIQIVIDDLLKQGVLTPQNSTMNTPVYPVPKPDGRWRMVLDYREVNKTIPLTAAQNQHSAGILATIVRQKYKTTLDLANGFWAHPITPDSYWLTAFTWQGKQYCWTRLPQGFLNSPALFNADAVDLLKEVPNVQVYVDDIYLSHDNPHEHIQQLEKVFQILLQAGYVVSLKKSEIGQRTVEFLGFNITKEGRGLTDTFKTKLLNVTPPKDLKQLQSILGKLNFARNFIPNFAELVQTLYNLIASSPGKYIEWTEDNTKQLNKVIEALNTASNLEERLPDQRLVIKVNTSPSAGYVRYYNESGKKPIMYLNYVFSKAELKFSMLEKLLTTMHKALIKAMDLAMGQEILVYSPIVSMTKIQKTPLPERKALPIRWITWMTYLEDPRIQFHYDKTLPELKHIPDVYTSSIPPLKHPSQYEGVFCTDGSAIKSPDPTKSNNAGMGIVHAIYNPEYKILNQWSIPLGHHTAQMAEIAAVEFACKKALKVPGPVLVITDSFYVAESANKELPYWKSNGFVNNKKEPLKHISKWKSIAECLSIKPDITIQHEKGHQPINTSIHTEGNALADKLATQGSYVVNAGKRTADGSEFEKRTADGSEFESPKKKAKVE

SEQ ID NO: 7649 - protein, 2096 aa, synthetic construct
MPAAKRVKLDGGDKKYSIGLDIGTNSVGWAVITDEYKVPSKKFKVLGNTDRHSIKKNLIGALLFDSGETAEATRLKRTARRRYTRRKNRICYLQEIFSNEMAKVDDSFFHRLEESFLVEEDKKHERHPIFGNIVDEVAYHEKYPTIYHLRKKLVDSTDKADLRLIYLALAHMIKFRGHFLIEGDLNPDNSDVDKLFIQLVQTYNQLFEENPINASGVDAKAILSARLSKSRRLENLIAQLPGEKKNGLFGNLIALSLGLTPNFKSNFDLAEDAKLQLSKDTYDDDLDNLLAQIGDQYADLFLAAKNLSDAILLSDILRVNTEITKAPLSASMIKRYDEHHQDLTLLKALVRQQLPEKYKEIFFDQSKNGYAGYIDGGASQEEFYKFIKPILEKMDGTEELLVKLNREDLLRKQRTFDNGSIPHQIHLGELHAILRRQEDFYPFLKDNREKIEKILTFRIPYYVGPLARGNSRFAWMTRKSEETITPWNFEEVVDKGASAQSFIERMTNFDKNLPNEKVLPKHSLLYEYFTVYNELTKVKYVTEGMRKPAFLSGEQKKAIVDLLFKTNRKVTVKQLKEDYFKKIECFDSVEISGVEDRFNASLGTYHDLLKIIKDKDFLDNEENEDILEDIVLTLTLFEDREMIEERLKTYAHLFDDKVMKQLKRRRYTGWGRLSRKLINGIRDKQSGKTILDFLKSDGFANRNFMQLIHDDSLTFKEDIQKAQVSGQGDSLHEHIANLAGSPAIKKGILQTVKVVDELVKVMGRHKPENIVIEMARENQTTQKGQKNSRERMKRIEEGIKELGSQILKEHPVENTQLQNEKLYLYYLQNGRDMYVDQELDINRLSDYDVDHIVPQSFLKDDSIDNKVLTRSDKARGKSDNVPSEEVVKKMKNYWRQLLNAKLITQRKFDNLTKAERGGLSELDKAGFIKRQLVETRQITKHVAQILDSRMNTKYDENDKLIREVKVITLKSKLVSDFRKDFQFYKVREINNYHHAHDAYLNAVVGTALIKKYPKLESEFVYGDYKVYDVRKMIAKSEQEIGKATAKYFFYSNIMNFFKTEITLANGEIRKRPLIETNGETGEIVWDKGRDFATVRKVLSMPQVNIVKKTEVQTGGFSKESILPKRNSDKLIARKKDWDPKKYGGFDSPTVAYSVLVVAKVEKGKSKKLKSVKELLGITIMERSSFEKNPIDFLEAKGYKEVKKDLIIKLPKYSLFELENGRKRMLASAGELQKGNELALPSKYVNFLYLASHYEKLKGSPEDNEQKQLFVEQHKHYLDEIIEQISEFSKRVILADANLDKVLSAYNKHRDKPIREQAENIIHLFTLTNLGAPAAFKYFDTTIDRKRYTSTKEVLDATLIHQSITGLYETRIDLSQLGGDGGPAPEAAAKGSSGGTLNIEDEYRLHETSKEPDVPLGSTWLSDFPQAWAETGGMGLAVRQAPLIIPLKATSTPVSIKQYPMSQEARLGIKPHIQRLLDQGILVPCQSPWNTPLLPVKKPGTNDYRPVQDLREVNKRVEDIHPTVPNPYNLLSGLPPSHQWYTVLDLKDAFFCLRLHPTSQPLFAFEWRDPEMGISGQLTWTRLPQGFKNSPTLFNEALHRDLADFRIQHPDLILLQYVDDLLLAATSEQDCQRGTRALLQTLGNLGYRASAKKAQICQKQVKYLGYLLKEGQRWLTEARKETVMGQPTPKTPRQLREFLGTAGFCRLWIPGFAEMAAPLYPLTKPGTLFNWGPDQQKAYQEIKQALLTAPALGLPDLTKPFELFVDEKQGYAKGVLTQKLGPWRRPVAYLSKKLDPVAAGWPPCLRMVAAIAVLTKDAGKLTMGQPLVILAPHAVEALVKQPPDRWLSNARMTHYQAMLLDTDRVQFGPVVALNPATLLPLPEKEAPHDCLEILAETHGTRPDLTDQPIPDADYTWYTDGSSFLQEGQRRAGAAVTTETEVIWARALPAGTSAQRAELIALTQALKMAEGKKLNVYTDSRYAFATAHVHGEIYRRRGWLTSEGREIKNKNEILALLKALFLPKRLSIIHCPGHQKGNSAEARGNRMADQAAREAAMKAVLETSTLLAGKRTADGSEFEKRTADGSEFESPKKKAKVE

SEQ ID NO: 7650 - protein, 2122 aa, synthetic construct
MPAAKRVKLDGGDKKYSIGLDIGTNSVGWAVITDEYKVPSKKFKVLGNTDRHSIKKNLIGALLFDSGETAEATRLKRTARRRYTRRKNRICYLQEIFSNEMAKVDDSFFHRLEESFLVEEDKKHERHPIFGNIVDEVAYHEKYPTIYHLRKKLVDSTDKADLRLIYLALAHMIKFRGHFLIEGDLNPDNSDVDKLFIQLVQTYNQLFEENPINASGVDAKAILSARLSKSRRLENLIAQLPGEKKNGLFGNLIALSLGLTPNFKSNFDLAEDAKLQLSKDTYDDDLDNLLAQIGDQYADLFLAAKNLSDAILLSDILRVNTEITKAPLSASMIKRYDEHHQDLTLLKALVRQQLPEKYKEIFFDQSKNGYAGYIDGGASQEEFYKFIKPILEKMDGTEELLVKLNREDLLRKQRTFDNGSIPHQIHLGELHAILRRQEDFYPFLKDNREKIEKILTFRIPYYVGPLARGNSRFAWMTRKSEETITPWNFEEVVDKGASAQSFIERMTNFDKNLPNEKVLPKHSLLYEYFTVYNELTKVKYVTEGMRKPAFLSGEQKKAIVDLLFKTNRKVTVKQLKEDYFKKIECFDSVEISGVEDRFNASLGTYHDLLKIIKDKDFLDNEENEDILEDIVLTLTLFEDREMIEERLKTYAHLFDDKVMKQLKRRRYTGWGRLSRKLINGIRDKQSGKTILDFLKSDGFANRNFMQLIHDDSLTFKEDIQKAQVSGQGDSLHEHIANLAGSPAIKKGILQTVKVVDELVKVMGRHKPENIVIEMARENQTTQKGQKNSRERMKRIEEGIKELGSQILKEHPVENTQLQNEKLYLYYLQNGRDMYVDQELDINRLSDYDVDHIVPQSFLKDDSIDNKVLTRSDKARGKSDNVPSEEVVKKMKNYWRQLLNAKLITQRKFDNLTKAERGGLSELDKAGFIKRQLVETRQITKHVAQILDSRMNTKYDENDKLIREVKVITLKSKLVSDFRKDFQFYKVREINNYHHAHDAYLNAVVGTALIKKYPKLESEFVYGDYKVYDVRKMIAKSEQEIGKATAKYFFYSNIMNFFKTEITLANGEIRKRPLIETNGETGEIVWDKGRDFATVRKVLSMPQVNIVKKTEVQTGGFSKESILPKRNSDKLIARKKDWDPKKYGGFDSPTVAYSVLVVAKVEKGKSKKLKSVKELLGITIMERSSFEKNPIDFLEAKGYKEVKKDLIIKLPKYSLFELENGRKRMLASAGELQKGNELALPSKYVNFLYLASHYEKLKGSPEDNEQKQLFVEQHKHYLDEIIEQISEFSKRVILADANLDKVLSAYNKHRDKPIREQAENIIHLFTLTNLGAPAAFKYFDTTIDRKRYTSTKEVLDATLIHQSITGLYETRIDLSQLGGDGGAEAAAKEAAAKEAAAKEAAAKALEAEAAAKEAAAKEAAAKEAAAKAGGVPWILKKPLELTIKLDLEEQQGTLLNNSILSKKGKEELKQLFEKYSALWQSWENQVGHRRIRPHKIATGTVKPTPQKQYHINPKAKPDIQIVINDLLKQGVLIQKESTMNTPVYPVPKPNGRWRMVLDYRAVNKVTPLIAVQNQHSYGILGSLFKGRYKTTIDLSNGFWAHPIVPEDYWITAFTWQGKQYCWTVLPQGFLNSPGLFTGDVVDLLQGIPNVEVYVDDVYISHDSEKEHLEYLDILFNRLKEAGYIISLKKSNIANSIVDFLGFQITNEGRGLTDTFKEKLENITAPTTLKQLQSILGLLNFARNFIPDFTELIAPLYALIPKSTKNYVPWQIEHSTTLETLITKLNGAEYLQGRKGDKTLIMKVNASYTTGYIRYYNEGEKKPISYVSIVFSKTELKFTELEKLLTTVHKGLLKALDLSMGQNIHVYSPIVSMQNIQKTPQTAKKALASRWLSWLSYLEDPRIRFFYDPQMPALKDLPAVDTGKDNKKHPSNFQHIFYTDGSAITSPTKEGHLNAGMGIVYFINKDGNLQKQQEWSISLGNHTAQFAEIAAFEFALKKCLPLGGNILVVTDSNYVAKAYNEELDVWASNGFVNNRKKPLKHISKWKSVADLKRLRPDVVVTHEPGHQKLDSSPHAYGNNLADQLATQASFKVHAGKRTADGSEFEKRTADGSEFESPKKKAKVE

SEQ ID NO: 7651 - protein, 2122 aa, synthetic construct
MPAAKRVKLDGGDKKYSIGLDIGTNSVGWAVITDEYKVPSKKFKVLGNTDRHSIKKNLIGALLFDSGETAEATRLKRTARRRYTRRKNRICYLQEIFSNEMAKVDDSFFHRLEESFLVEEDKKHERHPIFGNIVDEVAYHEKYPTIYHLRKKLVDSTDKADLRLIYLALAHMIKFRGHFLIEGDLNPDNSDVDKLFIQLVQTYNQLFEENPINASGVDAKAILSARLSKSRRLENLIAQLPGEKKNGLFGNLIALSLGLTPNFKSNFDLAEDAKLQLSKDTYDDDLDNLLAQIGDQYADLFLAAKNLSDAILLSDILRVNTEITKAPLSASMIKRYDEHHQDLTLLKALVRQQLPEKYKEIFFDQSKNGYAGYIDGGASQEEFYKFIKPILEKMDGTEELLVKLNREDLLRKQRTFDNGSIPHQIHLGELHAILRRQEDFYPFLKDNREKIEKILTFRIPYYVGPLARGNSRFAWMTRKSEETITPWNFEEVVDKGASAQSFIERMTNFDKNLPNEKVLPKHSLLYEYFTVYNELTKVKYVTEGMRKPAFLSGEQKKAIVDLLFKTNRKVTVKQLKEDYFKKIECFDSVEISGVEDRFNASLGTYHDLLKIIKDKDFLDNEENEDILEDIVLTLTLFEDREMIEERLKTYAHLFDDKVMKQLKRRRYTGWGRLSRKLINGIRDKQSGKTILDFLKSDGFANRNFMQLIHDDSLTFKEDIQKAQVSGQGDSLHEHIANLAGSPAIKKGILQTVKVVDELVKVMGRHKPENIVIEMARENQTTQKGQKNSRERMKRIEEGIKELGSQILKEHPVENTQLQNEKLYLYYLQNGRDMYVDQELDINRLSDYDVDHIVPQSFLKDDSIDNKVLTRSDKARGKSDNVPSEEVVKKMKNYWRQLLNAKLITQRKFDNLTKAERGGLSELDKAGFIKRQLVETRQITKHVAQILDSRMNTKYDENDKLIREVKVITLKSKLVSDFRKDFQFYKVREINNYHHAHDAYLNAVVGTALIKKYPKLESEFVYGDYKVYDVRKMIAKSEQEIGKATAKYFFYSNIMNFFKTEITLANGEIRKRPLIETNGETGEIVWDKGRDFATVRKVLSMPQVNIVKKTEVQTGGFSKESILPKRNSDKLIARKKDWDPKKYGGFDSPTVAYSVLVVAKVEKGKSKKLKSVKELLGITIMERSSFEKNPIDFLEAKGYKEVKKDLIIKLPKYSLFELENGRKRMLASAGELQKGNELALPSKYVNFLYLASHYEKLKGSPEDNEQKQLFVEQHKHYLDEIIEQISEFSKRVILADANLDKVLSAYNKHRDKPIREQAENIIHLFTLTNLGAPAAFKYFDTTIDRKRYTSTKEVLDATLIHQSITGLYETRIDLSQLGGDGGAEAAAKEAAAKEAAAKEAAAKALEAEAAAKEAAAKEAAAKEAAAKAGGVPWILKKPLELTIKLDLEEQQGTLLNNSILSKKGKEELKQLFEKYSALWQSWENQVGHRRIRPHKIATGTVKPTPQKQYHINPKAKPDIQIVINDLLKQGVLIQKESTMNTPVYPVPKPNGRWRMVLDYRAVNKVTPLIAVQNQHSYGILGSLFKGRYKTTIDLSNGFWAHPIVPEDYWITAFTWQGKQYCWTVLPQGFLNSPGLFNGDVVDLLQGIPNVEVYVDDVYISHDSEKEHLEYLDILFNRLKEAGYIISLKKSNIANSIVDFLGFQITNEGRGLTDTFKEKLENITAPTTLKQLQSILGKLNFARNFIPDFTELIAPLYALIPKSPKNYVPWQIEHSTTLETLITKLNGAEYLQGRKGDKTLIMKVNASYTTGYIRYYNEGEKKPISYVSIVFSKTELKFTELEKLLTTVHKGLLKALDLSMGQNIHVYSPIVSMQNIQKTPQTAKKALASRWLSWLSYLEDPRIRFFYDPQMPALKDLPAVDTGKDNKKHPSNFQHIFYTDGSAITSPTKEGHLNAGMGIVYFINKDGNLQKQQEWSISLGNHTAQFAEIAAFEFALKKCLPLGGNILVVTDSNYVAKAYNEELDVWASNGFVNNRKKPLKHISKWKSVADLKRLRPDVVVTHEPGHQKLDSSPHAYGNNLADQLATQASFKVHAGKRTADGSEFEKRTADGSEFESPKKKAKVE

SEQ ID NO: 7652 - protein, 2122 aa, synthetic construct
MPAAKRVKLDGGDKKYSIGLDIGTNSVGWAVITDEYKVPSKKFKVLGNTDRHSIKKNLIGALLFDSGETAEATRLKRTARRRYTRRKNRICYLQEIFSNEMAKVDDSFFHRLEESFLVEEDKKHERHPIFGNIVDEVAYHEKYPTIYHLRKKLVDSTDKADLRLIYLALAHMIKFRGHFLIEGDLNPDNSDVDKLFIQLVQTYNQLFEENPINASGVDAKAILSARLSKSRRLENLIAQLPGEKKNGLFGNLIALSLGLTPNFKSNFDLAEDAKLQLSKDTYDDDLDNLLAQIGDQYADLFLAAKNLSDAILLSDILRVNTEITKAPLSASMIKRYDEHHQDLTLLKALVRQQLPEKYKEIFFDQSKNGYAGYIDGGASQEEFYKFIKPILEKMDGTEELLVKLNREDLLRKQRTFDNGSIPHQIHLGELHAILRRQEDFYPFLKDNREKIEKILTFRIPYYVGPLARGNSRFAWMTRKSEETITPWNFEEVVDKGASAQSFIERMTNFDKNLPNEKVLPKHSLLYEYFTVYNELTKVKYVTEGMRKPAFLSGEQKKAIVDLLFKTNRKVTVKQLKEDYFKKIECFDSVEISGVEDRFNASLGTYHDLLKIIKDKDFLDNEENEDILEDIVLTLTLFEDREMIEERLKTYAHLFDDKVMKQLKRRRYTGWGRLSRKLINGIRDKQSGKTILDFLKSDGFANRNFMQLIHDDSLTFKEDIQKAQVSGQGDSLHEHIANLAGSPAIKKGILQTVKVVDELVKVMGRHKPENIVIEMARENQTTQKGQKNSRERMKRIEEGIKELGSQILKEHPVENTQLQNEKLYLYYLQNGRDMYVDQELDINRLSDYDVDHIVPQSFLKDDSIDNKVLTRSDKARGKSDNVPSEEVVKKMKNYWRQLLNAKLITQRKFDNLTKAERGGLSELDKAGFIKRQLVETRQITKHVAQILDSRMNTKYDENDKLIREVKVITLKSKLVSDFRKDFQFYKVREINNYHHAHDAYLNAVVGTALIKKYPKLESEFVYGDYKVYDVRKMIAKSEQEIGKATAKYFFYSNIMNFFKTEITLANGEIRKRPLIETNGETGEIVWDKGRDFATVRKVLSMPQVNIVKKTEVQTGGFSKESILPKRNSDKLIARKKDWDPKKYGGFDSPTVAYSVLVVAKVEKGKSKKLKSVKELLGITIMERSSFEKNPIDFLEAKGYKEVKKDLIIKLPKYSLFELENGRKRMLASAGELQKGNELALPSKYVNFLYLASHYEKLKGSPEDNEQKQLFVEQHKHYLDEIIEQISEFSKRVILADANLDKVLSAYNKHRDKPIREQAENIIHLFTLTNLGAPAAFKYFDTTIDRKRYTSTKEVLDATLIHQSITGLYETRIDLSQLGGDGGAEAAAKEAAAKEAAAKEAAAKALEAEAAAKEAAAKEAAAKEAAAKAGGVPWLTQQPLQLTILVPLQEYQEKILSKTALPEDQKQQLKTLFVKYDNLWQHWENQVGHRKIRPHNIATGDYPPRPQKQYPINPKAKPSIQIVIDDLLKQGVLTPQNSTMNTPVYPVPKPDGRWRMVLDYREVNKTIPLTAAQNQHSAGILATIVRQKYKTTLDLANGFWAHPITPESYWLTAFTWQGKQYCWTRLPQGFLNSPALFTADVVDLLKEIPNVQVYVDDIYLSHDDPKEHVQQLEKVFQILLQAGYVVSLKKSEIGQKTVEFLGFNITKEGRGLTDTFKTKLLNITPPKDLKQLQSILGLLNFARNFIPNFAELVQPLYNLIASAKGKYIEWSEENTKQLNMVIEALNTASNLEERLPEQRLVIKVNTSPSAGYVRYYNETGKKPIMYLNYVFSKAELKFSMLEKLLTTMHKALIKAMDLAMGQEILVYSPIVSMTKIQKTPLPERKALPIRWITWMTYLEDPRIQFHYDKTLPELKHIPDVYTSSQSPVKHPSQYEGVFYTDGSAIKSPDPTKSNNAGMGIVHATYKPEYQVLNQWSIPLGNHTAQMAEIAAVEFACKKALKIPGPVLVITDSFYVAESANKELPYWKSNGFVNNKKKPLKHISKWKSIAECLSMKPDITIQHEKGISLQIPVFILKGNALADKLATQGSYVVNAGKRTADGSEFEKRTADGSEFESPKKKAKVE

SEQ ID NO: 7653 - protein, 2211 aa, synthetic construct
MPAAKRVKLDGGDKKYSIGLDIGTNSVGWAVITDEYKVPSKKFKVLGNTDRHSIKKNLIGALLFDSGETAEATRLKRTARRRYTRRKNRICYLQEIFSNEMAKVDDSFFHRLEESFLVEEDKKHERHPIFGNIVDEVAYHEKYPTIYHLRKKLVDSTDKADLRLIYLALAHMIKFRGHFLIEGDLNPDNSDVDKLFIQLVQTYNQLFEENPINASGVDAKAILSARLSKSRRLENLIAQLPGEKKNGLFGNLIALSLGLTPNFKSNFDLAEDAKLQLSKDTYDDDLDNLLAQIGDQYADLFLAAKNLSDAILLSDILRVNTEITKAPLSASMIKRYDEHHQDLTLLKALVRQQLPEKYKEIFFDQSKNGYAGYIDGGASQEEFYKFIKPILEKMDGTEELLVKLNREDLLRKQRTFDNGSIPHQIHLGELHAILRRQEDFYPFLKDNREKIEKILTFRIPYYVGPLARGNSRFAWMTRKSEETITPWNFEEVVDKGASAQSFIERMTNFDKNLPNEKVLPKHSLLYEYFTVYNELTKVKYVTEGMRKPAFLSGEQKKAIVDLLFKTNRKVTVKQLKEDYFKKIECFDSVEISGVEDRFNASLGTYHDLLKIIKDKDFLDNEENEDILEDIVLTLTLFEDREMIEERLKTYAHLFDDKVMKQLKRRRYTGWGRLSRKLINGIRDKQSGKTILDFLKSDGFANRNFMQLIHDDSLTFKEDIQKAQVSGQGDSLHEHIANLAGSPAIKKGILQTVKVVDELVKVMGRHKPENIVIEMARENQTTQKGQKNSRERMKRIEEGIKELGSQILKEHPVENTQLQNEKLYLYYLQNGRDMYVDQELDINRLSDYDVDHIVPQSFLKDDSIDNKVLTRSDKARGKSDNVPSEEVVKKMKNYWRQLLNAKLITQRKFDNLTKAERGGLSELDKAGFIKRQLVETRQITKHVAQILDSRMNTKYDENDKLIREVKVITLKSKLVSDFRKDFQFYKVREINNYHHAHDAYLNAVVGTALIKKYPKLESEFVYGDYKVYDVRKMIAKSEQEIGKATAKYFFYSNIMNFFKTEITLANGEIRKRPLIETNGETGEIVWDKGRDFATVRKVLSMPQVNIVKKTEVQTGGFSKESILPKRNSDKLIARKKDWDPKKYGGFDSPTVAYSVLVVAKVEKGKSKKLKSVKELLGITIMERSSFEKNPIDFLEAKGYKEVKKDLIIKLPKYSLFELENGRKRMLASAGELQKGNELALPSKYVNFLYLASHYEKLKGSPEDNEQKQLFVEQHKHYLDEIIEQISEFSKRVILADANLDKVLSAYNKHRDKPIREQAENIIHLFTLTNLGAPAAFKYFDTTIDRKRYTSTKEVLDATLIHQSITGLYETRIDLSQLGGDGGAEAAAKEAAAKEAAAKEAAAKALEAEAAAKEAAAKEAAAKEAAAKAGGMNPLQLLQPLPAEIKGTKLLAHWNSGATITCIPESFLEDEQPIKKTLIKTIHGEKQQNVYYVTFKVKGRKVEAEVIASPYEYILLSPTDVPWLTQQPLQLTILVPLQEYQEKILSKTALPEDQKQQLKTLFVKYDNLWQHWENQVGHRKIRPHNIATGDYPPRPQKQYPINPKAKPSIQIVIDDLLKQGVLTPQNSTMNTPVYPVPKPDGRWRMVLDYREVNKTIPLTAAQNQHSAGILATIVRQKYKTTLDLANGFWAHPITPESYWLTAFTWQGKQYCWTRLPQGFLNSPALFNADVVDLLKEIPNVQVYVDDIYLSHDDPKEHVQQLEKVFQILLQAGYVVSLKKSEIGQKTVEFLGFNITKEGRGLTDTFKTKLLNITPPKDLKQLQSILGLLNFARNFIPNFAELVQPLYNLIAPAKGKYIEWSEENTKQLNMVIEALNTASNLEERLPEQRLVIKVNTSPSAGYVRYYNETGKKPIMYLNYVFSKAELKFSMLEKLLTTMHKALIKAMDLAMGQEILVYSPIVSMTKIQKTPLPERKALPIRWITWMTYLEDPRIQFHYDKTLPELKHIPDVYTSSQSPVKHPSQYEGVFYTDGSAIKSPDPTKSNNAGMGIVHATYKPEYQVLNQWSIPLGNHTAQMAEIAAVEFACKKALKIPGPVLVITDSFYVAESANKELPYWKSNGFVNNKKKPLKHISKWKSIAECLSMKPDITIQHEKGISLQIPVFILKGNALADKLATQGSYVVNAGKRTADGSEFEKRTADGSEFESPKKKAKVE

SEQ ID NO: 7654 - protein, 2211 aa, synthetic construct
MPAAKRVKLDGGDKKYSIGLDIGTNSVGWAVITDEYKVPSKKFKVLGNTDRHSIKKNLIGALLFDSGETAEATRLKRTARRRYTRRKNRICYLQEIFSNEMAKVDDSFFHRLEESFLVEEDKKHERHPIFGNIVDEVAYHEKYPTIYHLRKKLVDSTDKADLRLIYLALAHMIKFRGHFLIEGDLNPDNSDVDKLFIQLVQTYNQLFEENPINASGVDAKAILSARLSKSRRLENLIAQLPGEKKNGLFGNLIALSLGLTPNFKSNFDLAEDAKLQLSKDTYDDDLDNLLAQIGDQYADLFLAAKNLSDAILLSDILRVNTEITKAPLSASMIKRYDEHHQDLTLLKALVRQQLPEKYKEIFFDQSKNGYAGYIDGGASQEEFYKFIKPILEKMDGTEELLVKLNREDLLRKQRTFDNGSIPHQIHLGELHAILRRQEDFYPFLKDNREKIEKILTFRIPYYVGPLARGNSRFAWMTRKSEETITPWNFEEVVDKGASAQSFIERMTNFDKNLPNEKVLPKHSLLYEYFTVYNELTKVKYVTEGMRKPAFLSGEQKKAIVDLLFKTNRKVTVKQLKEDYFKKIECFDSVEISGVEDRFNASLGTYHDLLKIIKDKDFLDNEENEDILEDIVLTLTLFEDREMIEERLKTYAHLFDDKVMKQLKRRRYTGWGRLSRKLINGIRDKQSGKTILDFLKSDGFANRNFMQLIHDDSLTFKEDIQKAQVSGQGDSLHEHIANLAGSPAIKKGILQTVKVVDELVKVMGRHKPENIVIEMARENQTTQKGQKNSRERMKRIEEGIKELGSQILKEHPVENTQLQNEKLYLYYLQNGRDMYVDQELDINRLSDYDVDHIVPQSFLKDDSIDNKVLTRSDKARGKSDNVPSEEVVKKMKNYWRQLLNAKLITQRKFDNLTKAERGGLSELDKAGFIKRQLVETRQITKHVAQILDSRMNTKYDENDKLIREVKVITLKSKLVSDFRKDFQFYKVREINNYHHAHDAYLNAVVGTALIKKYPKLESEFVYGDYKVYDVRKMIAKSEQEIGKATAKYFFYSNIMNFFKTEITLANGEIRKRPLIETNGETGEIVWDKGRDFATVRKVLSMPQVNIVKKTEVQTGGFSKESILPKRNSDKLIARKKDWDPKKYGGFDSPTVAYSVLVVAKVEKGKSKKLKSVKELLGITIMERSSFEKNPIDFLEAKGYKEVKKDLIIKLPKYSLFELENGRKRMLASAGELQKGNELALPSKYVNFLYLASHYEKLKGSPEDNEQKQLFVEQHKHYLDEIIEQISEFSKRVILADANLDKVLSAYNKHRDKPIREQAENIIHLFTLTNLGAPAAFKYFDTTIDRKRYTSTKEVLDATLIHQSITGLYETRIDLSQLGGDGGAEAAAKEAAAKEAAAKEAAAKALEAEAAAKEAAAKEAAAKEAAAKAGGMNPLQLLQPLPAEIKGTKLLAHWNSGATITCIPESFLEDEQPIKKTLIKTIHGEKQQNVYYVTFKVKGRKVEAEVIASPYEYILLSPTDVPWLTQQPLQLTILVPLQEYQEKILSKTALPEDQKQQLKTLFVKYDNLWQHWENQVGHRKIRPHNIATGDYPPRPQKQYPINPKAKPSIQIVIDDLLKQGVLTPQNSTMNTPVYPVPKPDGRWRMVLDYREVNKTIPLTAAQNQHSAGILATIVRQKYKTTLDLANGFWAHPITPESYWLTAFTWQGKQYCWTRLPQGFLNSPALFNADVVDLLKEIPNVQVYVDDIYLSHDDPKEHVQQLEKVFQILLQAGYVVSLKKSEIGQKTVEFLGFNITKEGRGLTDTFKTKLLNITPPKDLKQLQSILGKLNFARNFIPNFAELVQPLYNLIAPAKGKYIEWSEENTKQLNMVIEALNTASNLEERLPEQRLVIKVNTSPSAGYVRYYNETGKKPIMYLNYVFSKAELKFSMLEKLLTTMHKALIKAMDLAMGQEILVYSPIVSMTKIQKTPLPERKALPIRWITWMTYLEDPRIQFHYDKTLPELKHIPDVYTSSQSPVKHPSQYEGVFYTDGSAIKSPDPTKSNNAGMGIVHATYKPEYQVLNQWSIPLGNHTAQMAEIAAVEFACKKALKIPGPVLVITDSFYVAESANKELPYWKSNGFVNNKKKPLKHISKWKSIAECLSMKPDITIQHEKGISLQIPVFILKGNALADKLATQGSYVVNAGKRTADGSEFEKRTADGSEFESPKKKAKVE

SEQ ID NO: 7655 - protein, 2162 aa, synthetic construct
MPAAKRVKLDGGDKKYSIGLDIGTNSVGWAVITDEYKVPSKKFKVLGNTDRHSIKKNLIGALLFDSGETAEATRLKRTARRRYTRRKNRICYLQEIFSNEMAKVDDSFFHRLEESFLVEEDKKHERHPIFGNIVDEVAYHEKYPTIYHLRKKLVDSTDKADLRLIYLALAHMIKFRGHFLIEGDLNPDNSDVDKLFIQLVQTYNQLFEENPINASGVDAKAILSARLSKSRRLENLIAQLPGEKKNGLFGNLIALSLGLTPNFKSNFDLAEDAKLQLSKDTYDDDLDNLLAQIGDQYADLFLAAKNLSDAILLSDILRVNTEITKAPLSASMIKRYDEHHQDLTLLKALVRQQLPEKYKEIFFDQSKNGYAGYIDGGASQEEFYKFIKPILEKMDGTEELLVKLNREDLLRKQRTFDNGSIPHQIHLGELHAILRRQEDFYPFLKDNREKIEKILTFRIPYYVGPLARGNSRFAWMTRKSEETITPWNFEEVVDKGASAQSFIERMTNFDKNLPNEKVLPKHSLLYEYFTVYNELTKVKYVTEGMRKPAFLSGEQKKAIVDLLFKTNRKVTVKQLKEDYFKKIECFDSVEISGVEDRFNASLGTYHDLLKIIKDKDFLDNEENEDILEDIVLTLTLFEDREMIEERLKTYAHLFDDKVMKQLKRRRYTGWGRLSRKLINGIRDKQSGKTILDFLKSDGFANRNFMQLIHDDSLTFKEDIQKAQVSGQGDSLHEHIANLAGSPAIKKGILQTVKVVDELVKVMGRHKPENIVIEMARENQTTQKGQKNSRERMKRIEEGIKELGSQILKEHPVENTQLQNEKLYLYYLQNGRDMYVDQELDINRLSDYDVDHIVPQSFLKDDSIDNKVLTRSDKARGKSDNVPSEEVVKKMKNYWRQLLNAKLITQRKFDNLTKAERGGLSELDKAGFIKRQLVETRQITKHVAQILDSRMNTKYDENDKLIREVKVITLKSKLVSDFRKDFQFYKVREINNYHHAHDAYLNAVVGTALIKKYPKLESEFVYGDYKVYDVRKMIAKSEQEIGKATAKYFFYSNIMNFFKTEITLANGEIRKRPLIETNGETGEIVWDKGRDFATVRKVLSMPQVNIVKKTEVQTGGFSKESILPKRNSDKLIARKKDWDPKKYGGFDSPTVAYSVLVVAKVEKGKSKKLKSVKELLGITIMERSSFEKNPIDFLEAKGYKEVKKDLIIKLPKYSLFELENGRKRMLASAGELQKGNELALPSKYVNFLYLASHYEKLKGSPEDNEQKQLFVEQHKHYLDEIIEQISEFSKRVILADANLDKVLSAYNKHRDKPIREQAENIIHLFTLTNLGAPAAFKYFDTTIDRKRYTSTKEVLDATLIHQSITGLYETRIDLSQLGGDGGAEAAAKEAAAKEAAAKEAAAKALEAEAAAKEAAAKEAAAKEAAAKAGGLLGRDLLTKLKAQIQFSTEGPQVTWEDRPAMCLVLNLEEEYRLHEKPVPPSIDPSWLQLFPMVWAEKAGMGLANQVPPVVVELKSDASPVAVRQYPMSKEAREGIRPHIQRFLDLGILVPCQSPWNTPLLPVKKPGTNDYRPVQDLREVNKRVQDIHPTVPNPYNLLSSLPPSHTWYSVLDLKDAFFCLKLHPNSQPLFAFEWRDPEKGNTGQLTWTRLPQGFKNSPTLFDEALHRDLASFRALNPQVVMLQYVDDLLVAAPTYRDCKEGTRRLLQELSKLGYRVSAKKAQLCREEVTYLGYLLKGGKRWLTPARKATVMKIPTPTTPRQVREFLGTAGFCRLWIPGFASLAAPLYPLTREKVPFTWTEAHQEAFGRIKEALLSAPALALPDLTKPFALYVDEKEGVARGVLTQTLGPWRRPVAYLSKKLDPVASGWPTCLKAIAAVALLLKDADKLTLGQNVLVIAPHNLESIVRQPPDRWMTNARMTHYQSLLLNERVSFAPPAILNPATLLPVESDDTPIHICSEILAEETGTRPDLRDQPLPGVPAWYTDGSSFIMDGRRQAGAAIVDNKRTVWASNLPEGTSAQKAELIALTQALRLAEGKSINIYTDSRYAFATAHVHGAIYKQRGLLTSAGKDIKNKEEILALLEAIHLPKRVAIIHCPGHQRGTDPVATGNRKADEAAKQAAQSTRILTETTKNAGKRTADGSEFEKRTADGSEFESPKKKAKVE

SEQ ID NO: 7656 - protein, 2253 aa, synthetic construct
MPAAKRVKLDGGDKKYSIGLDIGTNSVGWAVITDEYKVPSKKFKVLGNTDRHSIKKNLIGALLFDSGETAEATRLKRTARRRYTRRKNRICYLQEIFSNEMAKVDDSFFHRLEESFLVEEDKKHERHPIFGNIVDEVAYHEKYPTIYHLRKKLVDSTDKADLRLIYLALAHMIKFRGHFLIEGDLNPDNSDVDKLFIQLVQTYNQLFEENPINASGVDAKAILSARLSKSRRLENLIAQLPGEKKNGLFGNLIALSLGLTPNFKSNFDLAEDAKLQLSKDTYDDDLDNLLAQIGDQYADLFLAAKNLSDAILLSDILRVNTEITKAPLSASMIKRYDEHHQDLTLLKALVRQQLPEKYKEIFFDQSKNGYAGYIDGGASQEEFYKFIKPILEKMDGTEELLVKLNREDLLRKQRTFDNGSIPHQIHLGELHAILRRQEDFYPFLKDNREKIEKILTFRIPYYVGPLARGNSRFAWMTRKSEETITPWNFEEVVDKGASAQSFIERMTNFDKNLPNEKVLPKHSLLYEYFTVYNELTKVKYVTEGMRKPAFLSGEQKKAIVDLLFKTNRKVTVKQLKEDYFKKIECFDSVEISGVEDRFNASLGTYHDLLKIIKDKDFLDNEENEDILEDIVLTLTLFEDREMIEERLKTYAHLFDDKVMKQLKRRRYTGWGRLSRKLINGIRDKQSGKTILDFLKSDGFANRNFMQLIHDDSLTFKEDIQKAQVSGQGDSLHEHIANLAGSPAIKKGILQTVKVVDELVKVMGRHKPENIVIEMARENQTTQKGQKNSRERMKRIEEGIKELGSQILKEHPVENTQLQNEKLYLYYLQNGRDMYVDQELDINRLSDYDVDHIVPQSFLKDDSIDNKVLTRSDKARGKSDNVPSEEVVKKMKNYWRQLLNAKLITQRKFDNLTKAERGGLSELDKAGFIKRQLVETRQITKHVAQILDSRMNTKYDENDKLIREVKVITLKSKLVSDFRKDFQFYKVREINNYHHAHDAYLNAVVGTALIKKYPKLESEFVYGDYKVYDVRKMIAKSEQEIGKATAKYFFYSNIMNFFKTEITLANGEIRKRPLIETNGETGEIVWDKGRDFATVRKVLSMPQVNIVKKTEVQTGGFSKESILPKRNSDKLIARKKDWDPKKYGGFDSPTVAYSVLVVAKVEKGKSKKLKSVKELLGITIMERSSFEKNPIDFLEAKGYKEVKKDLIIKLPKYSLFELENGRKRMLASAGELQKGNELALPSKYVNFLYLASHYEKLKGSPEDNEQKQLFVEQHKHYLDEIIEQISEFSKRVILADANLDKVLSAYNKHRDKPIREQAENIIHLFTLTNLGAPAAFKYFDTTIDRKRYTSTKEVLDATLIHQSITGLYETRIDLSQLGGDGGAEAAAKEAAAKEAAAKEAAAKALEAEAAAKEAAAKEAAAKEAAAKAGGTLGDQGSRGSDPLPEPRVTLTVEGIPTEFLVNTGAEHSVLTKPMGKMGSKRTVVAGATGSKVYPWTTKRLLKIGQKQVTHSFLVIPECPAPLLGRDLLTKLKAQIQFSTEGPQVTWEDRPAMCLVLNLEEEYRLHEKPVPPSIDPSWLQLFPMVWAEKAGMGLANQVPPVVVELKSDASPVAVRQYPMSKEAREGIRPHIQRFLDLGILVPCQSPWNTPLLPVKKPGTNDYRPVQDLREVNKRVQDIHPTVPNPYNLLSSLPPSHTWYSVLDLKDAFFCLKLHPNSQPLFAFEWRDPEKGNTGQLTWTRLPQGFKNSPTLFNEALHRDLASFRALNPQVVMLQYVDDLLVAAPTYRDCKEGTRRLLQELSKLGYRVSAKKAQLCREEVTYLGYLLKGGKRWLTPARKATVMKIPTPTTPRQVREFLGTAGFCRLWIPGFASLAAPLYPLTRPKVPFTWTEAHQEAFGRIKEALLSAPALALPDLTKPFALYVDEKEGVARGVLTQTLGPWRRPVAYLSKKLDPVASGWPTCLKAIAAVALLLKDADKLTLGQNVLVIAPHNLESIVRQPPDRWMTNARMTHYQSLLLNERVSFAPPAILNPATLLPVESDDTPIHICSEILAEETGTRPDLRDQPLPGVPAWYTDGSSFIMDGRRQAGAAIVDNKRTVWASNLPEGTSAQKAELIALTQALRLAEGKSINIYTDSRYAFATAHVHGAIYKQRGWLTSAGKDIKNKEEILALLEAIHLPKRVAIIHCPGHQRGTDPVATGNRKADEAAKQAAQSTRILTETTKNAGKRTADGSEFEKRTADGSEFESPKKKAKVE

SEQ ID NO: 7657 - protein, 2131 aa, synthetic construct
MPAAKRVKLDGGDKKYSIGLDIGTNSVGWAVITDEYKVPSKKFKVLGNTDRHSIKKNLIGALLFDSGETAEATRLKRTARRRYTRRKNRICYLQEIFSNEMAKVDDSFFHRLEESFLVEEDKKHERHPIFGNIVDEVAYHEKYPTIYHLRKKLVDSTDKADLRLIYLALAHMIKFRGHFLIEGDLNPDNSDVDKLFIQLVQTYNQLFEENPINASGVDAKAILSARLSKSRRLENLIAQLPGEKKNGLFGNLIALSLGLTPNFKSNFDLAEDAKLQLSKDTYDDDLDNLLAQIGDQYADLFLAAKNLSDAILLSDILRVNTEITKAPLSASMIKRYDEHHQDLTLLKALVRQQLPEKYKEIFFDQSKNGYAGYIDGGASQEEFYKFIKPILEKMDGTEELLVKLNREDLLRKQRTFDNGSIPHQIHLGELHAILRRQEDFYPFLKDNREKIEKILTFRIPYYVGPLARGNSRFAWMTRKSEETITPWNFEEVVDKGASAQSFIERMTNFDKNLPNEKVLPKHSLLYEYFTVYNELTKVKYVTEGMRKPAFLSGEQKKAIVDLLFKTNRKVTVKQLKEDYFKKIECFDSVEISGVEDRFNASLGTYHDLLKIIKDKDFLDNEENEDILEDIVLTLTLFEDREMIEERLKTYAHLFDDKVMKQLKRRRYTGWGRLSRKLINGIRDKQSGKTILDFLKSDGFANRNFMQLIHDDSLTFKEDIQKAQVSGQGDSLHEHIANLAGSPAIKKGILQTVKVVDELVKVMGRHKPENIVIEMARENQTTQKGQKNSRERMKRIEEGIKELGSQILKEHPVENTQLQNEKLYLYYLQNGRDMYVDQELDINRLSDYDVDHIVPQSFLKDDSIDNKVLTRSDKARGKSDNVPSEEVVKKMKNYWRQLLNAKLITQRKFDNLTKAERGGLSELDKAGFIKRQLVETRQITKHVAQILDSRMNTKYDENDKLIREVKVITLKSKLVSDFRKDFQFYKVREINNYHHAHDAYLNAVVGTALIKKYPKLESEFVYGDYKVYDVRKMIAKSEQEIGKATAKYFFYSNIMNFFKTEITLANGEIRKRPLIETNGETGEIVWDKGRDFATVRKVLSMPQVNIVKKTEVQTGGFSKESILPKRNSDKLIARKKDWDPKKYGGFDSPTVAYSVLVVAKVEKGKSKKLKSVKELLGITIMERSSFEKNPIDFLEAKGYKEVKKDLIIKLPKYSLFELENGRKRMLASAGELQKGNELALPSKYVNFLYLASHYEKLKGSPEDNEQKQLFVEQHKHYLDEIIEQISEFSKRVILADANLDKVLSAYNKHRDKPIREQAENIIHLFTLTNLGAPAAFKYFDTTIDRKRYTSTKEVLDATLIHQSITGLYETRIDLSQLGGDGGAEAAAKEAAAKEAAAKEAAAKALEAEAAAKEAAAKEAAAKEAAAKAGGTLNLEDEYRLYETSAEPEVSPGSTWLSDFPQAWAETGGMGLAVRQAPLIIPLKATSTPVSIKQYPMSQEAKLGIKPHIQRLLDQGILVPCQSPWNTPLLPVKKPGTNDYRPVQDLREVNKRVEDIHPTVPNPYNLLSGLPPSHRWYTVLDLKDAFFCLRLHPTSQPLFAFEWRDPGMGISGQLTWTRLPQGFKNSPTLFNEALHRDLADFRIQHPDLILLQYVDDILLAATSELDCQQGTRALLLTLGNLGYRASAKKAQLCQKQVKYLGYLLKEGQRWLTEARKETVMGQPTPKTPRQLREFLGTAGFCRLWIPGFAEMAAPLYPLTKPGTLFNWGPDQQKAYQEIKQALLTAPALGLPDLTKPFELFVDEKQGYAKGVLTQKLGPWRRPVAYLSKKLDPVAAGWPPCLRMVAAIAVLRKDAGKLTMGQPLVILAPHAVEALVKQPPDRWLSNARMTHYQAMLLDTDRVQFGPVVALNPATLLPLPEEGAPHDCLEILAETHGTRPDLTDQPIPDADHTWYTDGSSFLQEGQRKAGAAVTTETEVIWARALPAGTSAQRAELIALTQALKMAEGKRLNVYTDSRYAFATAHIHGEIYRRRGWLTSEGREIKNKSEILALLKALFLPKRLSIIHCLGHQKGDSAEARGNRLADQAAREAAIKTPPDTSTLLAGKRTADGSEFEKRTADGSEFESPKKKAKVE

SEQ ID NO: 7658 - protein, 2131 aa, synthetic construct
MPAAKRVKLDGGDKKYSIGLDIGTNSVGWAVITDEYKVPSKKFKVLGNTDRHSIKKNLIGALLFDSGETAEATRLKRTARRRYTRRKNRICYLQEIFSNEMAKVDDSFFHRLEESFLVEEDKKHERHPIFGNIVDEVAYHEKYPTIYHLRKKLVDSTDKADLRLIYLALAHMIKFRGHFLIEGDLNPDNSDVDKLFIQLVQTYNQLFEENPINASGVDAKAILSARLSKSRRLENLIAQLPGEKKNGLFGNLIALSLGLTPNFKSNFDLAEDAKLQLSKDTYDDDLDNLLAQIGDQYADLFLAAKNLSDAILLSDILRVNTEITKAPLSASMIKRYDEHHQDLTLLKALVRQQLPEKYKEIFFDQSKNGYAGYIDGGASQEEFYKFIKPILEKMDGTEELLVKLNREDLLRKQRTFDNGSIPHQIHLGELHAILRRQEDFYPFLKDNREKIEKILTFRIPYYVGPLARGNSRFAWMTRKSEETITPWNFEEVVDKGASAQSFIERMTNFDKNLPNEKVLPKHSLLYEYFTVYNELTKVKYVTEGMRKPAFLSGEQKKAIVDLLFKTNRKVTVKQLKEDYFKKIECFDSVEISGVEDRFNASLGTYHDLLKIIKDKDFLDNEENEDILEDIVLTLTLFEDREMIEERLKTYAHLFDDKVMKQLKRRRYTGWGRLSRKLINGIRDKQSGKTILDFLKSDGFANRNFMQLIHDDSLTFKEDIQKAQVSGQGDSLHEHIANLAGSPAIKKGILQTVKVVDELVKVMGRHKPENIVIEMARENQTTQKGQKNSRERMKRIEEGIKELGSQILKEHPVENTQLQNEKLYLYYLQNGRDMYVDQELDINRLSDYDVDHIVPQSFLKDDSIDNKVLTRSDKARGKSDNVPSEEVVKKMKNYWRQLLNAKLITQRKFDNLTKAERGGLSELDKAGFIKRQLVETRQITKHVAQILDSRMNTKYDENDKLIREVKVITLKSKLVSDFRKDFQFYKVREINNYHHAHDAYLNAVVGTALIKKYPKLESEFVYGDYKVYDVRKMIAKSEQEIGKATAKYFFYSNIMNFFKTEITLANGEIRKRPLIETNGETGEIVWDKGRDFATVRKVLSMPQVNIVKKTEVQTGGFSKESILPKRNSDKLIARKKDWDPKKYGGFDSPTVAYSVLVVAKVEKGKSKKLKSVKELLGITIMERSSFEKNPIDFLEAKGYKEVKKDLIIKLPKYSLFELENGRKRMLASAGELQKGNELALPSKYVNFLYLASHYEKLKGSPEDNEQKQLFVEQHKHYLDEIIEQISEFSKRVILADANLDKVLSAYNKHRDKPIREQAENIIHLFTLTNLGAPAAFKYFDTTIDRKRYTSTKEVLDATLIHQSITGLYETRIDLSQLGGDGGAEAAAKEAAAKEAAAKEAAAKALEAEAAAKEAAAKEAAAKEAAAKAGGTLNIEDEYRLHETSKEPDVSLGSTWLSDFPQAWAETGGMGLAVRQAPLIIPLKATSTPVSIKQYPMSQEARLGIKPHIQRLLDQGILVPCQSPWNTPLLPVKKPGTNDYRPVQDLREVNKRVEDIHPTVPNPYNLLSGLPPSHQWYTVLDLKDAFFCLRLHPTSQPLFAFEWRDPEMGISGQLTWTRLPQGFKNSPTLFNEALHRDLAGFRIQHPDLILLQYVDDLLLAATSELDCQQGTRALLQTLGDLGYRASAKKAQICQKQVKYLGYLLKEGQRWLTEARKETVMGQPIPKTPRQLREFLGTAGFCRLWIPGFAEMAAPLYPLTKPGTLFNWGPDQQKAFQEIKQALLTAPALGLPDLTKPFELFVDEKQGYAKGVLTQKLGPWRRPVAYLSKKLDPVAAGWPPCLRMVAAIAVLTKDAGKLTMGQPLVILAPHAVEALVKQPPDRWLSNARMTHYQALLLDTDRVQFGPVVALNPATLLPLPEEGLQHDCLDILAEAHGTRSDLMDQPLPDADHTWYTDGSSFLQEGQRKAGAAVTTETEVIWARALPAGTSAQRAELIALTQALKMAEGKKLNVYTDSRYAFATAHIHGEIYRRRGWLTSEGKEIKNKDEILALLKALFLPKRLSIIHCPGHQKGNSAEARGNRMADQAAREVATRETPETSTLLAGKRTADGSEFEKRTADGSEFESPKKKAKVE

SEQ ID NO: 7659 - protein, 2131 aa, synthetic construct
MPAAKRVKLDGGDKKYSIGLDIGTNSVGWAVITDEYKVPSKKFKVLGNTDRHSIKKNLIGALLFDSGETAEATRLKRTARRRYTRRKNRICYLQEIFSNEMAKVDDSFFHRLEESFLVEEDKKHERHPIFGNIVDEVAYHEKYPTIYHLRKKLVDSTDKADLRLIYLALAHMIKFRGHFLIEGDLNPDNSDVDKLFIQLVQTYNQLFEENPINASGVDAKAILSARLSKSRRLENLIAQLPGEKKNGLFGNLIALSLGLTPNFKSNFDLAEDAKLQLSKDTYDDDLDNLLAQIGDQYADLFLAAKNLSDAILLSDILRVNTEITKAPLSASMIKRYDEHHQDLTLLKALVRQQLPEKYKEIFFDQSKNGYAGYIDGGASQEEFYKFIKPILEKMDGTEELLVKLNREDLLRKQRTFDNGSIPHQIHLGELHAILRRQEDFYPFLKDNREKIEKILTFRIPYYVGPLARGNSRFAWMTRKSEETITPWNFEEVVDKGASAQSFIERMTNFDKNLPNEKVLPKHSLLYEYFTVYNELTKVKYVTEGMRKPAFLSGEQKKAIVDLLFKTNRKVTVKQLKEDYFKKIECFDSVEISGVEDRFNASLGTYHDLLKIIKDKDFLDNEENEDILEDIVLTLTLFEDREMIEERLKTYAHLFDDKVMKQLKRRRYTGWGRLSRKLINGIRDKQSGKTILDFLKSDGFANRNFMQLIHDDSLTFKEDIQKAQVSGQGDSLHEHIANLAGSPAIKKGILQTVKVVDELVKVMGRHKPENIVIEMARENQTTQKGQKNSRERMKRIEEGIKELGSQILKEHPVENTQLQNEKLYLYYLQNGRDMYVDQELDINRLSDYDVDHIVPQSFLKDDSIDNKVLTRSDKARGKSDNVPSEEVVKKMKNYWRQLLNAKLITQRKFDNLTKAERGGLSELDKAGFIKRQLVETRQITKHVAQILDSRMNTKYDENDKLIREVKVITLKSKLVSDFRKDFQFYKVREINNYHHAHDAYLNAVVGTALIKKYPKLESEFVYGDYKVYDVRKMIAKSEQEIGKATAKYFFYSNIMNFFKTEITLANGEIRKRPLIETNGETGEIVWDKGRDFATVRKVLSMPQVNIVKKTEVQTGGFSKESILPKRNSDKLIARKKDWDPKKYGGFDSPTVAYSVLVVAKVEKGKSKKLKSVKELLGITIMERSSFEKNPIDFLEAKGYKEVKKDLIIKLPKYSLFELENGRKRMLASAGELQKGNELALPSKYVNFLYLASHYEKLKGSPEDNEQKQLFVEQHKHYLDEIIEQISEFSKRVILADANLDKVLSAYNKHRDKPIREQAENIIHLFTLTNLGAPAAFKYFDTTIDRKRYTSTKEVLDATLIHQSITGLYETRIDLSQLGGDGGAEAAAKEAAAKEAAAKEAAAKALEAEAAAKEAAAKEAAAKEAAAKAGGTLNIEDEYRLHETSKGPDVPLGSTWLSDFPQAWAETGGMGLAFRQAPLIISLKATSTPVSIKQYPMSQEARLGIKPHIQRLLDQGILVPCQSPWNTPLLPVKKPGTNDYRPVQDLREVNKRVEDIHPTVPNPYNLLSGLPPSHQWYTVLDLKDAFFCLRLHPTSQSLFAFEWKDPEMGISGQLTWTRLPQGFKNSPTLFNEALHRDLADFRIQHPDLILLQYVDDLLLAATSELDCQQGTRALLQTLGDLGYRASAKKAQICQKQVKYLGYLLKEGQRWLTEARKETVMGQPTPKTPRQLREFLGKAGLCRLFIPGFAEMAAPLYPLTKPGTLFKWGPDQQKAYQEIKQALLTAPALGLPDLTKPFELFVDEKQGYAKGVLTQKLGPWRRPVAYLSKKLDPVAAGWPPCLRMVAAIAVLTKDVGKLTMGQPLVILAPHAVEALVKQPPDRWLSNARMTHYQALLLDTDRVQFGPIVALNPATLLPLPEEGLQHDCLDILAEAHGTRPDLTDQPLPDADHTWYTDGSSFLQEGQRRAGAAVTTETEVIWAKALPAGTSAQRAELIALTQALKMAAGKKLNVYTDSRYAFATAHIHGEIYRRRGWLTSEGKEIKNKDEILALLKALFLPKRLSIIHCPGHQKGNHAEARGNRMADQAAREVATRETPETSTLLAGKRTADGSEFEKRTADGSEFESPKKKAKVE

SEQ ID NO: 7660 - protein, 2131 aa, synthetic construct; identical to SEQ ID NO: 4540

SEQ ID NO: 7661 - protein, 2151 aa, synthetic construct
MPAAKRVKLDGGDKKYSIGLDIGTNSVGWAVITDEYKVPSKKFKVLGNTDRHSIKKNLIGALLFDSGETAEATRLKRTARRRYTRRKNRICYLQEIFSNEMAKVDDSFFHRLEESFLVEEDKKHERHPIFGNIVDEVAYHEKYPTIYHLRKKLVDSTDKADLRLIYLALAHMIKFRGHFLIEGDLNPDNSDVDKLFIQLVQTYNQLFEENPINASGVDAKAILSARLSKSRRLENLIAQLPGEKKNGLFGNLIALSLGLTPNFKSNFDLAEDAKLQLSKDTYDDDLDNLLAQIGDQYADLFLAAKNLSDAILLSDILRVNTEITKAPLSASMIKRYDEHHQDLTLLKALVRQQLPEKYKEIFFDQSKNGYAGYIDGGASQEEFYKFIKPILEKMDGTEELLVKLNREDLLRKQRTFDNGSIPHQIHLGELHAILRRQEDFYPFLKDNREKIEKILTFRIPYYVGPLARGNSRFAWMTRKSEETITPWNFEEVVDKGASAQSFIERMTNFDKNLPNEKVLPKHSLLYEYFTVYNELTKVKYVTEGMRKPAFLSGEQKKAIVDLLFKTNRKVTVKQLKEDYFKKIECFDSVEISGVEDRFNASLGTYHDLLKIIKDKDFLDNEENEDILEDIVLTLTLFEDREMIEERLKTYAHLFDDKVMKQLKRRRYTGWGRLSRKLINGIRDKQSGKTILDFLKSDGFANRNFMQLIHDDSLTFKEDIQKAQVSGQGDSLHEHIANLAGSPAIKKGILQTVKVVDELVKVMGRHKPENIVIEMARENQTTQKGQKNSRERMKRIEEGIKELGSQILKEHPVENTQLQNEKLYLYYLQNGRDMYVDQELDINRLSDYDVDHIVPQSFLKDDSIDNKVLTRSDKARGKSDNVPSEEVVKKMKNYWRQLLNAKLITQRKFDNLTKAERGGLSELDKAGFIKRQLVETRQITKHVAQILDSRMNTKYDENDKLIREVKVITLKSKLVSDFRKDFQFYKVREINNYHHAHDAYLNAVVGTALIKKYPKLESEFVYGDYKVYDVRKMIAKSEQEIGKATAKYFFYSNIMNFFKTEITLANGEIRKRPLIETNGETGEIVWDKGRDFATVRKVLSMPQVNIVKKTEVQTGGFSKESILPKRNSDKLIARKKDWDPKKYGGFDSPTVAYSVLVVAKVEKGKSKKLKSVKELLGITIMERSSFEKNPIDFLEAKGYKEVKKDLIIKLPKYSLFELENGRKRMLASAGELQKGNELALPSKYVNFLYLASHYEKLKGSPEDNEQKQLFVEQHKHYLDEIIEQISEFSKRVILADANLDKVLSAYNKHRDKPIREQAENIIHLFTLTNLGAPAAFKYFDTTIDRKRYTSTKEVLDATLIHQSITGLYETRIDLSQLGGDGGAEAAAKEAAAKEAAAKEAAAKALEAEAAAKEAAAKEAAAKEAAAKAGGWVQEISDSRPMLHIYLNGRRFLGLLNTGADKTCIAGRDWPANWPIHQTESSLQGLGMACGVARSSQPLRWQHEDKSGIIHPFVIPTLPFTLWGRDIMKDIKVRLMTDSPDDSQDLMIGAIESNLFADQISWKSDQPVWLNQWPLKQEKLQALQQLVTEQLQLGHLEESNSPWNTPVFVIKKKSGKWRLLQDLRAVNATMHDMGALQPGLPSPVAVPKGWEIIIIDLQDCFFNIKLHPEDCKRFAFSVPSPNFKRPYQRFQWKVLPQGMKNSPTLCQKFVDKAILTVRDKYQDSYIVHYMDDILLAHPSRSIVDEILTSMIQALNKHGLVVSTEKIQKYDNLKYLGTHIQGDSVSYQKLQIRTDKLRTLNDFQKLLGNINWIRPFLKLTTGELKPLFEILNPDSNPISTRKLTPEACKALQLMNERLSTARVKRLDLSQPWSLCILKTEYTPTACLWQDGVVEWIHLPHISPKVITPYDIFCTQLIIKGRHRSKELFSKDPDYIVVPYTKVQFDLLLQEKEDWPISLLGFLGEVHFHLPKDPLLTFTLQTAIIFPHMTSTTPLEKGIVIFTDGSANGRSVTYIQGREPIIKENTQNTAQQAEIVAVITAFEEVSQPFNLYTDSKYVTGLFPEIETATLSPRTKIYTELKHLQRLIHKRQEKFYIGHIRGHTGLPGPLAQGNAYADSLTRILTAGKRTADGSEFEKRTADGSEFESPKKKAKVE

SEQ ID NO: 7662 - protein, 2122 aa, synthetic construct
MPAAKRVKLDGGDKKYSIGLDIGTNSVGWAVITDEYKVPSKKFKVLGNTDRHSIKKNLIGALLFDSGETAEATRLKRTARRRYTRRKNRICYLQEIFSNEMAKVDDSFFHRLEESFLVEEDKKHERHPIFGNIVDEVAYHEKYPTIYHLRKKLVDSTDKADLRLIYLALAHMIKFRGHFLIEGDLNPDNSDVDKLFIQLVQTYNQLFEENPINASGVDAKAILSARLSKSRRLENLIAQLPGEKKNGLFGNLIALSLGLTPNFKSNFDLAEDAKLQLSKDTYDDDLDNLLAQIGDQYADLFLAAKNLSDAILLSDILRVNTEITKAPLSASMIKRYDEHHQDLTLLKALVRQQLPEKYKEIFFDQSKNGYAGYIDGGASQEEFYKFIKPILEKMDGTEELLVKLNREDLLRKQRTFDNGSIPHQIHLGELHAILRRQEDFYPFLKDNREKIEKILTFRIPYYVGPLARGNSRFAWMTRKSEETITPWNFEEVVDKGASAQSFIERMTNFDKNLPNEKVLPKHSLLYEYFTVYNELTKVKYVTEGMRKPAFLSGEQKKAIVDLLFKTNRKVTVKQLKEDYFKKIECFDSVEISGVEDRFNASLGTYHDLLKIIKDKDFLDNEENEDILEDIVLTLTLFEDREMIEERLKTYAHLFDDKVMKQLKRRRYTGWGRLSRKLINGIRDKQSGKTILDFLKSDGFANRNFMQLIHDDSLTFKEDIQKAQVSGQGDSLHEHIANLAGSPAIKKGILQTVKVVDELVKVMGRHKPENIVIEMARENQTTQKGQKNSRERMKRIEEGIKELGSQILKEHPVENTQLQNEKLYLYYLQNGRDMYVDQELDINRLSDYDVDHIVPQSFLKDDSIDNKVLTRSDKARGKSDNVPSEEVVKKMKNYWRQLLNAKLITQRKFDNLTKAERGGLSELDKAGFIKRQLVETRQITKHVAQILDSRMNTKYDENDKLIREVKVITLKSKLVSDFRKDFQFYKVREINNYHHAHDAYLNAVVGTALIKKYPKLESEFVYGDYKVYDVRKMIAKSEQEIGKATAKYFFYSNIMNFFKTEITLANGEIRKRPLIETNGETGEIVWDKGRDFATVRKVLSMPQVNIVKKTEVQTGGFSKESILPKRNSDKLIARKKDWDPKKYGGFDSPTVAYSVLVVAKVEKGKSKKLKSVKELLGITIMERSSFEKNPIDFLEAKGYKEVKKDLIIKLPKYSLFELENGRKRMLASAGELQKGNELALPSKYVNFLYLASHYEKLKGSPEDNEQKQLFVEQHKHYLDEIIEQISEFSKRVILADANLDKVLSAYNKHRDKPIREQAENIIHLFTLTNLGAPAAFKYFDTTIDRKRYTSTKEVLDATLIHQSITGLYETRIDLSQLGGDGGAEAAAKEAAAKEAAAKEAAAKALEAEAAAKEAAAKEAAAKEAAAKAGGVPWLMKKPLQLTVLVPLHEYQERLLQQTALPKEQKELLQKLFLKYDALWQHWENQVGHRRIKPHNIATGTLAPRPQKQYPINPKAKPSIQIVIDDLLKQGVLIQQNSTMNTPVYPVPKPDGKWRMVLDYREVNKTIPLIAAQNQHSAGILSSIYRGKYKTTLDLTNGFWAHPITPESYWLTAFTWQGKQYCWTRLPQGFLNSPALFTADVVDLLKEIPNVQAYVDDIYISHDDPQEHLEQLEKIFSILLNAGYVVSLKKSEIAQREVEFLGFNITKEGRGLTDTFKQKLLNITPPKDLKQLQSILGLLNFARNFIPNYSELVKPLYTIVANANGKFISWTEDNSNQLQHIISVLNQADNLEERNPETRLIIKVNSSPSAGYIRYYNEGSKRPIMYVNYIFSKAEAKFTQTEKLLTTMHKGLIKAMDLAMGQEILVYSPIVSMTKIQRTPLPERKALPVRWITWMTYLEDPRIQFHYDKSLPELQQIPNVTEDVIAKTKHPSEFAMVFYTDGSAIKHPDVNKSHSAGMGIAQVQFIPEYKIVHQWSIPLGDHTAQLAEIAAVEFACKKALKISGPVLIVTDSFYVAESANKELPYWKSNGFLNNKKKPLRHVSKWKSIAECLQLKPDIIIMHEKGHQQPMTTLHTEGNNLADKLATQGSYVVHAGKRTADGSEFEKRTADGSEFESPKKKAKVE

SEQ ID NO: 7663 - protein, 2122 aa, synthetic construct
MPAAKRVKLDGGDKKYSIGLDIGTNSVGWAVITDEYKVPSKKFKVLGNTDRHSIKKNLIGALLFDSGETAEATRLKRTARRRYTRRKNRICYLQEIFSNEMAKVDDSFFHRLEESFLVEEDKKHERHPIFGNIVDEVAYHEKYPTIYHLRKKLVDSTDKADLRLIYLALAHMIKFRGHFLIEGDLNPDNSDVDKLFIQLVQTYNQLFEENPINASGVDAKAILSARLSKSRRLENLIAQLPGEKKNGLFGNLIALSLGLTPNFKSNFDLAEDAKLQLSKDTYDDDLDNLLAQIGDQYADLFLAAKNLSDAILLSDILRVNTEITKAPLSASMIKRYDEHHQDLTLLKALVRQQLPEKYKEIFFDQSKNGYAGYIDGGASQEEFYKFIKPILEKMDGTEELLVKLNREDLLRKQRTFDNGSIPHQIHLGELHAILRRQEDFYPFLKDNREKIEKILTFRIPYYVGPLARGNSRFAWMTRKSEETITPWNFEEVVDKGASAQSFIERMTNFDKNLPNEKVLPKHSLLYEYFTVYNELTKVKYVTEGMRKPAFLSGEQKKAIVDLLFKTNRKVTVKQLKEDYFKKIECFDSVEISGVEDRFNASLGTYHDLLKIIKDKDFLDNEENEDILEDIVLTLTLFEDREMIEERLKTYAHLFDDKVMKQLKRRRYTGWGRLSRKLINGIRDKQSGKTILDFLKSDGFANRNFMQLIHDDSLTFKEDIQKAQVSGQGDSLHEHIANLAGSPAIKKGILQTVKVVDELVKVMGRHKPENIVIEMARENQTTQKGQKNSRERMKRIEEGIKELGSQILKEHPVENTQLQNEKLYLYYLQNGRDMYVDQELDINRLSDYDVDHIVPQSFLKDDSIDNKVLTRSDKARGKSDNVPSEEVVKKMKNYWRQLLNAKLITQRKFDNLTKAERGGLSELDKAGFIKRQLVETRQITKHVAQILDSRMNTKYDENDKLIREVKVITLKSKLVSDFRKDFQFYKVREINNYHHAHDAYLNAVVGTALIKKYPKLESEFVYGDYKVYDVRKMIAKSEQEIGKATAKYFFYSNIMNFFKTEITLANGEIRKRPLIETNGETGEIVWDKGRDFATVRKVLSMPQVNIVKKTEVQTGGFSKESILPKRNSDKLIARKKDWDPKKYGGFDSPTVAYSVLVVAKVEKGKSKKLKSVKELLGITIMERSSFEKNPIDFLEAKGYKEVKKDLIIKLPKYSLFELENGRKRMLASAGELQKGNELALPSKYVNFLYLASHYEKLKGSPEDNEQKQLFVEQHKHYLDEIIEQISEFSKRVILADANLDKVLSAYNKHRDKPIREQAENIIHLFTLTNLGAPAAFKYFDTTIDRKRYTSTKEVLDATLIHQSITGLYETRIDLSQLGGDGGAEAAAKEAAAKEAAAKEAAAKALEAEAAAKEAAAKEAAAKEAAAKAGGVPWLMKKPLQLTVLVPLHEYQERLLQQTALPKEQKELLQKLFLKYDALWQHWENQVGHRRIKPHNIATGTLAPRPQKQYPINPKAKPSIQIVIDDLLKQGVLIQQNSTMNTPVYPVPKPDGKWRMVLDYREVNKTIPLIAAQNQHSAGILSSIYRGKYKTTLDLTNGFWAHPITPESYWLTAFTWQGKQYCWTRLPQGFLNSPALFNADVVDLLKEIPNVQAYVDDIYISHDDPQEHLEQLEKIFSILLNAGYVVSLKKSEIAQREVEFLGFNITKEGRGLTDTFKQKLLNITPPKDLKQLQSILGLLNFARNFIPNYSELVKPLYTIVAPANGKFISWTEDNSNQLQHIISVLNQADNLEERNPETRLIIKVNSSPSAGYIRYYNEGSKRPIMYVNYIFSKAEAKFTQTEKLLTTMHKGLIKAMDLAMGQEILVYSPIVSMTKIQRTPLPERKALPVRWITWMTYLEDPRIQFHYDKSLPELQQIPNVTEDVIAKTKHPSEFAMVFYTDGSAIKHPDVNKSHSAGMGIAQVQFIPEYKIVHQWSIPLGDHTAQLAEIAAVEFACKKALKISGPVLIVTDSFYVAESANKELPYWKSNGFLNNKKKPLRHVSKWKSIAECLQLKPDIIIMHEKGHQQPMTTLHTEGNNLADKLATQGSYVVHAGKRTADGSEFEKRTADGSEFESPKKKAKVE

SEQ ID NO: 7664 - protein, 2122 aa, synthetic construct
MPAAKRVKLDGGDKKYSIGLDIGTNSVGWAVITDEYKVPSKKFKVLGNTDRHSIKKNLIGALLFDSGETAEATRLKRTARRRYTRRKNRICYLQEIFSNEMAKVDDSFFHRLEESFLVEEDKKHERHPIFGNIVDEVAYHEKYPTIYHLRKKLVDSTDKADLRLIYLALAHMIKFRGHFLIEGDLNPDNSDVDKLFIQLVQTYNQLFEENPINASGVDAKAILSARLSKSRRLENLIAQLPGEKKNGLFGNLIALSLGLTPNFKSNFDLAEDAKLQLSKDTYDDDLDNLLAQIGDQYADLFLAAKNLSDAILLSDILRVNTEITKAPLSASMIKRYDEHHQDLTLLKALVRQQLPEKYKEIFFDQSKNGYAGYIDGGASQEEFYKFIKPILEKMDGTEELLVKLNREDLLRKQRTFDNGSIPHQIHLGELHAILRRQEDFYPFLKDNREKIEKILTFRIPYYVGPLARGNSRFAWMTRKSEETITPWNFEEVVDKGASAQSFIERMTNFDKNLPNEKVLPKHSLLYEYFTVYNELTKVKYVTEGMRKPAFLSGEQKKAIVDLLFKTNRKVTVKQLKEDYFKKIECFDSVEISGVEDRFNASLGTYHDLLKIIKDKDFLDNEENEDILEDIVLTLTLFEDREMIEERLKTYAHLFDDKVMKQLKRRRYTGWGRLSRKLINGIRDKQSGKTILDFLKSDGFANRNFMQLIHDDSLTFKEDIQKAQVSGQGDSLHEHIANLAGSPAIKKGILQTVKVVDELVKVMGRHKPENIVIEMARENQTTQKGQKNSRERMKRIEEGIKELGSQILKEHPVENTQLQNEKLYLYYLQNGRDMYVDQELDINRLSDYDVDHIVPQSFLKDDSIDNKVLTRSDKARGKSDNVPSEEVVKKMKNYWRQLLNAKLITQRKFDNLTKAERGGLSELDKAGFIKRQLVETRQITKHVAQILDSRMNTKYDENDKLIREVKVITLKSKLVSDFRKDFQFYKVREINNYHHAHDAYLNAVVGTALIKKYPKLESEFVYGDYKVYDVRKMIAKSEQEIGKATAKYFFYSNIMNFFKTEITLANGEIRKRPLIETNGETGEIVWDKGRDFATVRKVLSMPQVNIVKKTEVQTGGFSKESILPKRNSDKLIARKKDWDPKKYGGFDSPTVAYSVLVVAKVEKGKSKKLKSVKELLGITIMERSSFEKNPIDFLEAKGYKEVKKDLIIKLPKYSLFELENGRKRMLASAGELQKGNELALPSKYVNFLYLASHYEKLKGSPEDNEQKQLFVEQHKHYLDEIIEQISEFSKRVILADANLDKVLSAYNKHRDKPIREQAENIIHLFTLTNLGAPAAFKYFDTTIDRKRYTSTKEVLDATLIHQSITGLYETRIDLSQLGGDGGAEAAAKEAAAKEAAAKEAAAKALEAEAAAKEAAAKEAAAKEAAAKAGGVPWLMKKPLQLTVLVPLHEYQERLLQQTALPKEQKELLQKLFLKYDALWQHWENQVGHRRIKPHNIATGTLAPRPQKQYPINPKAKPSIQIVIDDLLKQGVLIQQNSTMNTPVYPVPKPDGKWRMVLDYREVNKTIPLIAAQNQHSAGILSSIYRGKYKTTLDLTNGFWAHPITPESYWLTAFTWQGKQYCWTRLPQGFLNSPALFNADVVDLLKEIPNVQAYVDDIYISHDDPQEHLEQLEKIFSILLNAGYVVSLKKSEIAQREVEFLGFNITKEGRGLTDTFKQKLLNITPPKDLKQLQSILGKLNFARNFIPNYSELVKPLYTIVAPANGKFISWTEDNSNQLQHIISVLNQADNLEERNPETRLIIKVNSSPSAGYIRYYNEGSKRPIMYVNYIFSKAEAKFTQTEKLLTTMHKGLIKAMDLAMGQEILVYSPIVSMTKIQRTPLPERKALPVRWITWMTYLEDPRIQFHYDKSLPELQQIPNVTEDVIAKTKHPSEFAMVFYTDGSAIKHPDVNKSHSAGMGIAQVQFIPEYKIVHQWSIPLGDHTAQLAEIAAVEFACKKALKISGPVLIVTDSFYVAESANKELPYWKSNGFLNNKKKPLRHVSKWKSIAECLQLKPDIIIMHEKGHQQPMTTLHTEGNNLADKLATQGSYVVHAGKRTADGSEFEKRTADGSEFESPKKKAKVE

SEQ ID NO: 7665 - protein, 2211 aa, synthetic construct
MPAAKRVKLDGGDKKYSIGLDIGTNSVGWAVITDEYKVPSKKFKVLGNTDRHSIKKNLIGALLFDSGETAEATRLKRTARRRYTRRKNRICYLQEIFSNEMAKVDDSFFHRLEESFLVEEDKKHERHPIFGNIVDEVAYHEKYPTIYHLRKKLVDSTDKADLRLIYLALAHMIKFRGHFLIEGDLNPDNSDVDKLFIQLVQTYNQLFEENPINASGVDAKAILSARLSKSRRLENLIAQLPGEKKNGLFGNLIALSLGLTPNFKSNFDLAEDAKLQLSKDTYDDDLDNLLAQIGDQYADLFLAAKNLSDAILLSDILRVNTEITKAPLSASMIKRYDEHHQDLTLLKALVRQQLPEKYKEIFFDQSKNGYAGYIDGGASQEEFYKFIKPILEKMDGTEELLVKLNREDLLRKQRTFDNGSIPHQIHLGELHAILRRQEDFYPFLKDNREKIEKILTFRIPYYVGPLARGNSRFAWMTRKSEETITPWNFEEVVDKGASAQSFIERMTNFDKNLPNEKVLPKHSLLYEYFTVYNELTKVKYVTEGMRKPAFLSGEQKKAIVDLLFKTNRKVTVKQLKEDYFKKIECFDSVEISGVEDRFNASLGTYHDLLKIIKDKDFLDNEENEDILEDIVLTLTLFEDREMIEERLKTYAHLFDDKVMKQLKRRRYTGWGRLSRKLINGIRDKQSGKTILDFLKSDGFANRNFMQLIHDDSLTFKEDIQKAQVSGQGDSLHEHIANLAGSPAIKKGILQTVKVVDELVKVMGRHKPENIVIEMARENQTTQKGQKNSRERMKRIEEGIKELGSQILKEHPVENTQLQNEKLYLYYLQNGRDMYVDQELDINRLSDYDVDHIVPQSFLKDDSIDNKVLTRSDKARGKSDNVPSEEVVKKMKNYWRQLLNAKLITQRKFDNLTKAERGGLSELDKAGFIKRQLVETRQITKHVAQILDSRMNTKYDENDKLIREVKVITLKSKLVSDFRKDFQFYKVREINNYHHAHDAYLNAVVGTALIKKYPKLESEFVYGDYKVYDVRKMIAKSEQEIGKATAKYFFYSNIMNFFKTEITLANGEIRKRPLIETNGETGEIVWDKGRDFATVRKVLSMPQVNIVKKTEVQTGGFSKESILPKRNSDKLIARKKDWDPKKYGGFDSPTVAYSVLVVAKVEKGKSKKLKSVKELLGITIMERSSFEKNPIDFLEAKGYKEVKKDLIIKLPKYSLFELENGRKRMLASAGELQKGNELALPSKYVNFLYLASHYEKLKGSPEDNEQKQLFVEQHKHYLDEIIEQISEFSKRVILADANLDKVLSAYNKHRDKPIREQAENIIHLFTLTNLGAPAAFKYFDTTIDRKRYTSTKEVLDATLIHQSITGLYETRIDLSQLGGDGGAEAAAKEAAAKEAAAKEAAAKALEAEAAAKEAAAKEAAAKEAAAKAGGMDPLQLLQPLEAEIKGTKLKAHWNSGATITCVPEAFLEDERPIQTMLIKTIHGEKQQDVYYLTFKVQGRKVEAEVLASPYDYILLNPSDVPWLMKKPLQLTVLVPLHEYQERLLQQTALPKEQKELLQKLFLKYDALWQHWENQVGHRRIKPHNIATGTLAPRPQKQYPINPKAKPSIQIVIDDLLKQGVLIQQNSTMNTPVYPVPKPDGKWRMVLDYREVNKTIPLIAAQNQHSAGILSSIYRGKYKTTLDLTNGFWAHPITPESYWLTAFTWQGKQYCWTRLPQGFLNSPALFNADVVDLLKEIPNVQAYVDDIYISHDDPQEHLEQLEKIFSILLNAGYVVSLKKSEIAQREVEFLGFNITKEGRGLTDTFKQKLLNITPPKDLKQLQSILGLLNFARNFIPNYSELVKPLYTIVAPANGKFISWTEDNSNQLQHIISVLNQADNLEERNPETRLIIKVNSSPSAGYIRYYNEGSKRPIMYVNYIFSKAEAKFTQTEKLLTTMHKGLIKAMDLAMGQEILVYSPIVSMTKIQRTPLPERKALPVRWITWMTYLEDPRIQFHYDKSLPELQQIPNVTEDVIAKTKHPSEFAMVFYTDGSAIKHPDVNKSHSAGMGIAQVQFIPEYKIVHQWSIPLGDHTAQLAEIAAVEFACKKALKISGPVLIVTDSFYVAESANKELPYWKSNGFLNNKKKPLRHVSKWKSIAECLQLKPDIIIMHEKGHQQPMTTLHTEGNNLADKLATQGSYVVHAGKRTADGSEFEKRTADGSEFESPKKKAKVE

SEQ ID NO: 7666 - protein, 2122 aa, synthetic construct
MPAAKRVKLDGGDKKYSIGLDIGTNSVGWAVITDEYKVPSKKFKVLGNTDRHSIKKNLIGALLFDSGETAEATRLKRTARRRYTRRKNRICYLQEIFSNEMAKVDDSFFHRLEESFLVEEDKKHERHPIFGNIVDEVAYHEKYPTIYHLRKKLVDSTDKADLRLIYLALAHMIKFRGHFLIEGDLNPDNSDVDKLFIQLVQTYNQLFEENPINASGVDAKAILSARLSKSRRLENLIAQLPGEKKNGLFGNLIALSLGLTPNFKSNFDLAEDAKLQLSKDTYDDDLDNLLAQIGDQYADLFLAAKNLSDAILLSDILRVNTEITKAPLSASMIKRYDEHHQDLTLLKALVRQQLPEKYKEIFFDQSKNGYAGYIDGGASQEEFYKFIKPILEKMDGTEELLVKLNREDLLRKQRTFDNGSIPHQIHLGELHAILRRQEDFYPFLKDNREKIEKILTFRIPYYVGPLARGNSRFAWMTRKSEETITPWNFEEVVDKGASAQSFIERMTNFDKNLPNEKVLPKHSLLYEYFTVYNELTKVKYVTEGMRKPAFLSGEQKKAIVDLLFKTNRKVTVKQLKEDYFKKIECFDSVEISGVEDRFNASLGTYHDLLKIIKDKDFLDNEENEDILEDIVLTLTLFEDREMIEERLKTYAHLFDDKVMKQLKRRRYTGWGRLSRKLINGIRDKQSGKTILDFLKSDGFANRNFMQLIHDDSLTFKEDIQKAQVSGQGDSLHEHIANLAGSPAIKKGILQTVKVVDELVKVMGRHKPENIVIEMARENQTTQKGQKNSRERMKRIEEGIKELGSQILKEHPVENTQLQNEKLYLYYLQNGRDMYVDQELDINRLSDYDVDHIVPQSFLKDDSIDNKVLTRSDKARGKSDNVPSEEVVKKMKNYWRQLLNAKLITQRKFDNLTKAERGGLSELDKAGFIKRQLVETRQITKHVAQILDSRMNTKYDENDKLIREVKVITLKSKLVSDFRKDFQFYKVREINNYHHAHDAYLNAVVGTALIKKYPKLESEFVYGDYKVYDVRKMIAKSEQEIGKATAKYFFYSNIMNFFKTEITLANGEIRKRPLIETNGETGEIVWDKGRDFATVRKVLSMPQVNIVKKTEVQTGGFSKESILPKRNSDKLIARKKDWDPKKYGGFDSPTVAYSVLVVAKVEKGKSKKLKSVKELLGITIMERSSFEKNPIDFLEAKGYKEVKKDLIIKLPKYSLFELENGRKRMLASAGELQKGNELALPSKYVNFLYLASHYEKLKGSPEDNEQKQLFVEQHKHYLDEIIEQISEFSKRVILADANLDKVLSAYNKHRDKPIREQAENIIHLFTLTNLGAPAAFKYFDTTIDRKRYTSTKEVLDATLIHQSITGLYETRIDLSQLGGDGGAEAAAKEAAAKEAAAKEAAAKALEAEAAAKEAAAKEAAAKEAAAKAGGIPWLMKKPLQLTTLVPLQEYEERLLKQTMLTGSYKEKLQSLFLKYDALWQHWENQVGHRRIKPHHIATGTVNPRPQKQYPINPKAKASIQTVINDLLKQGVLIQQNSIMNTPVYPVPKPDGKWRMVLDYREVNKTIPLIAAQNQHSAGILSSIFRGKYKTTLDLSNGFWAHSITPESYWLTAFTWLGQQYCWTRLPQGFLNSPALFNADVVDLLKEVPNVQVYVDDIYISHDDPREHLEQLEKVFSLLLNAGYVVSLKKSEIAQHEVEFLGFNITKEGRGLTETFKQKLLNITPPRDLKQLQSILGLLNFARNFIPNFSELVKPLYNIIATAPGKYITWTTDNSQQLQNIISMLNSAENLEERNPEVRLIMKVNTSPSAGYIRFYNEFAKRPIMYLNYVYTKAEVKFTNTEKLLTTIHKGLIKALDLGMGQEILVYSPIVSMTKIQKTPLPERKALPIRWITWMSYLEDPRIQFHYDKTLPELQQVPTVTDDIIAKIKHPSEFSMVFYTDGSAIKHPNVNKSHNAGMGIAQVQFKPEFTVINTWSIPLGDHTAQLAEVAAVEFACKKALKIDGPVLIVTDSFYVAESVNKELPYWQSNGFFNNKKKPLKHVSKWKSIADCIQLKPDIIIIHEKGHQPTASTFHTEGNNLADKLATQGSYVVNAGKRTADGSEFEKRTADGSEFESPKKKAKVE

SEQ ID NO: 7667 - protein, 2122 aa, synthetic construct; identical to SEQ ID NO: 4541

SEQ ID NO: 7668 - protein, 2102 aa, synthetic construct
MPAAKRVKLDGGDKKYSIGLDIGTNSVGWAVITDEYKVPSKKFKVLGNTDRHSIKKNLIGALLFDSGETAEATRLKRTARRRYTRRKNRICYLQEIFSNEMAKVDDSFFHRLEESFLVEEDKKHERHPIFGNIVDEVAYHEKYPTIYHLRKKLVDSTDKADLRLIYLALAHMIKFRGHFLIEGDLNPDNSDVDKLFIQLVQTYNQLFEENPINASGVDAKAILSARLSKSRRLENLIAQLPGEKKNGLFGNLIALSLGLTPNFKSNFDLAEDAKLQLSKDTYDDDLDNLLAQIGDQYADLFLAAKNLSDAILLSDILRVNTEITKAPLSASMIKRYDEHHQDLTLLKALVRQQLPEKYKEIFFDQSKNGYAGYIDGGASQEEFYKFIKPILEKMDGTEELLVKLNREDLLRKQRTFDNGSIPHQIHLGELHAILRRQEDFYPFLKDNREKIEKILTFRIPYYVGPLARGNSRFAWMTRKSEETITPWNFEEVVDKGASAQSFIERMTNFDKNLPNEKVLPKHSLLYEYFTVYNELTKVKYVTEGMRKPAFLSGEQKKAIVDLLFKTNRKVTVKQLKEDYFKKIECFDSVEISGVEDRFNASLGTYHDLLKIIKDKDFLDNEENEDILEDIVLTLTLFEDREMIEERLKTYAHLFDDKVMKQLKRRRYTGWGRLSRKLINGIRDKQSGKTILDFLKSDGFANRNFMQLIHDDSLTFKEDIQKAQVSGQGDSLHEHIANLAGSPAIKKGILQTVKVVDELVKVMGRHKPENIVIEMARENQTTQKGQKNSRERMKRIEEGIKELGSQILKEHPVENTQLQNEKLYLYYLQNGRDMYVDQELDINRLSDYDVDHIVPQSFLKDDSIDNKVLTRSDKARGKSDNVPSEEVVKKMKNYWRQLLNAKLITQRKFDNLTKAERGGLSELDKAGFIKRQLVETRQITKHVAQILDSRMNTKYDENDKLIREVKVITLKSKLVSDFRKDFQFYKVREINNYHHAHDAYLNAVVGTALIKKYPKLESEFVYGDYKVYDVRKMIAKSEQEIGKATAKYFFYSNIMNFFKTEITLANGEIRKRPLIETNGETGEIVWDKGRDFATVRKVLSMPQVNIVKKTEVQTGGFSKESILPKRNSDKLIARKKDWDPKKYGGFDSPTVAYSVLVVAKVEKGKSKKLKSVKELLGITIMERSSFEKNPIDFLEAKGYKEVKKDLIIKLPKYSLFELENGRKRMLASAGELQKGNELALPSKYVNFLYLASHYEKLKGSPEDNEQKQLFVEQHKHYLDEIIEQISEFSKRVILADANLDKVLSAYNKHRDKPIREQAENIIHLFTLTNLGAPAAFKYFDTTIDRKRYTSTKEVLDATLIHQSITGLYETRIDLSQLGGDGGGGGGSEAAAKGGGGSGGTAPLEEEYRLFLEAPIQNVTLLEQWKREIPKVWAEINPPGLASTQAPIHVQLLSTALPVRVRQYPITLEAKRSLRETIRKFRAAGILRPVHSPWNTPLLPVRKSGTSEYRMVQDLREVNKRVETIHPTVPNPYTLLSLLPPDRIWYSVLDLKDAFFCIPLAPESQLIFAFEWADAEEGESGQLTWTRLPQGFKNSPTLFDEALNRDLQGFRLDHPSVSLLQYVDDLLIAADTQAACLSATRDLLMTLAELGYRVSGKKAQLCQEEVTYLGFKIHKGSRSLSNSRTQAILQIPVPKTKRQVREFLGTIGYCRLWIPGFAELAQPLYAATRGGNDPLVWGEKEEEAFQSLKLALTQPPALALPSLDKPFQLFVEETSGAAKGVLTQALGPWKRPVAYLSKRLDPVAAGWPRCLRAIAAAALLTREASKLTFGQDIEITSSHNLESLLRSPPDKWLTNARITQYQVLLLDPPRVRFKQTAALNPATLLPETDDTLPIHHCLDTLDSLTSTRPDLTDQPLAQAEATLFTDGSSYIRDGKRYAGAAVVTLDSVIWAEPLPIGTSAQKAELIALTKALEWSKDKSVNIYTDSRYAFATLHVHGMIYRERGLLTAGGKAIKNAPEILALLTAVWLPKRVAVMHCKGHQKDDAPTSTGNRRADEVAREVAIRPLSTQATISAGKRTADGSEFEKRTADGSEFESPKKKAKVE

SEQ ID NO: 7669 - protein, 2177 aa, synthetic construct
MPAAKRVKLDGGDKKYSIGLDIGTNSVGWAVITDEYKVPSKKFKVLGNTDRHSIKKNLIGALLFDSGETAEATRLKRTARRRYTRRKNRICYLQEIFSNEMAKVDDSFFHRLEESFLVEEDKKHERHPIFGNIVDEVAYHEKYPTIYHLRKKLVDSTDKADLRLIYLALAHMIKFRGHFLIEGDLNPDNSDVDKLFIQLVQTYNQLFEENPINASGVDAKAILSARLSKSRRLENLIAQLPGEKKNGLFGNLIALSLGLTPNFKSNFDLAEDAKLQLSKDTYDDDLDNLLAQIGDQYADLFLAAKNLSDAILLSDILRVNTEITKAPLSASMIKRYDEHHQDLTLLKALVRQQLPEKYKEIFFDQSKNGYAGYIDGGASQEEFYKFIKPILEKMDGTEELLVKLNREDLLRKQRTFDNGSIPHQIHLGELHAILRRQEDFYPFLKDNREKIEKILTFRIPYYVGPLARGNSRFAWMTRKSEETITPWNFEEVVDKGASAQSFIERMTNFDKNLPNEKVLPKHSLLYEYFTVYNELTKVKYVTEGMRKPAFLSGEQKKAIVDLLFKTNRKVTVKQLKEDYFKKIECFDSVEISGVEDRFNASLGTYHDLLKIIKDKDFLDNEENEDILEDIVLTLTLFEDREMIEERLKTYAHLFDDKVMKQLKRRRYTGWGRLSRKLINGIRDKQSGKTILDFLKSDGFANRNFMQLIHDDSLTFKEDIQKAQVSGQGDSLHEHIANLAGSPAIKKGILQTVKVVDELVKVMGRHKPENIVIEMARENQTTQKGQKNSRERMKRIEEGIKELGSQILKEHPVENTQLQNEKLYLYYLQNGRDMYVDQELDINRLSDYDVDHIVPQSFLKDDSIDNKVLTRSDKARGKSDNVPSEEVVKKMKNYWRQLLNAKLITQRKFDNLTKAERGGLSELDKAGFIKRQLVETRQITKHVAQILDSRMNTKYDENDKLIREVKVITLKSKLVSDFRKDFQFYKVREINNYHHAHDAYLNAVVGTALIKKYPKLESEFVYGDYKVYDVRKMIAKSEQEIGKATAKYFFYSNIMNFFKTEITLANGEIRKRPLIETNGETGEIVWDKGRDFATVRKVLSMPQVNIVKKTEVQTGGFSKESILPKRNSDKLIARKKDWDPKKYGGFDSPTVAYSVLVVAKVEKGKSKKLKSVKELLGITIMERSSFEKNPIDFLEAKGYKEVKKDLIIKLPKYSLFELENGRKRMLASAGELQKGNELALPSKYVNFLYLASHYEKLKGSPEDNEQKQLFVEQHKHYLDEIIEQISEFSKRVILADANLDKVLSAYNKHRDKPIREQAENIIHLFTLTNLGAPAAFKYFDTTIDRKRYTSTKEVLDATLIHQSITGLYETRIDLSQLGGDGGGGGGSEAAAKGGGGSGGMDLLKPLTVERKGVKIKGYWNSQADITCVPKDLLQGEEPVRQQNVTTIHGTQEGDVYYVNLKIDGRRINTEVIGTTLDYAIITPGDVPWILKKPLELTIKLDLEEQQGTLLNNSILSKKGKEELKQLFEKYSALWQSWENQVGHRRIRPHKIATGTVKPTPQKQYHINPKAKPDIQIVINDLLKQGVLIQKESTMNTPVYPVPKPNGRWRMVLDYRAVNKVTPLIAVQNQHSYGILGSLFKGRYKTTIDLSNGFWAHPIVPEDYWITAFTWQGKQYCWTVLPQGFLNSPGLFNGDVVDLLQGIPNVEVYVDDVYISHDSEKEHLEYLDILFNRLKEAGYIISLKKSNIANSIVDFLGFQITNEGRGLTDTFKEKLENITAPTTLKQLQSILGLLNFARNFIPDFTELIAPLYALIPKSPKNYVPWQIEHSTTLETLITKLNGAEYLQGRKGDKTLIMKVNASYTTGYIRYYNEGEKKPISYVSIVFSKTELKFTELEKLLTTVHKGLLKALDLSMGQNIHVYSPIVSMQNIQKTPQTAKKALASRWLSWLSYLEDPRIRFFYDPQMPALKDLPAVDTGKDNKKHPSNFQHIFYTDGSAITSPTKEGHLNAGMGIVYFINKDGNLQKQQEWSISLGNHTAQFAEIAAFEFALKKCLPLGGNILVVTDSNYVAKAYNEELDVWASNGFVNNRKKPLKHISKWKSVADLKRLRPDVVVTHEPGHQKLDSSPHAYGNNLADQLATQASFKVHAGKRTADGSEFEKRTADGSEFESPKKKAKVE

SEQ ID NO: 7670 - protein, 2099 aa, synthetic construct
MPAAKRVKLDGGDKKYSIGLDIGTNSVGWAVITDEYKVPSKKFKVLGNTDRHSIKKNLIGALLFDSGETAEATRLKRTARRRYTRRKNRICYLQEIFSNEMAKVDDSFFHRLEESFLVEEDKKHERHPIFGNIVDEVAYHEKYPTIYHLRKKLVDSTDKADLRLIYLALAHMIKFRGHFLIEGDLNPDNSDVDKLFIQLVQTYNQLFEENPINASGVDAKAILSARLSKSRRLENLIAQLPGEKKNGLFGNLIALSLGLTPNFKSNFDLAEDAKLQLSKDTYDDDLDNLLAQIGDQYADLFLAAKNLSDAILLSDILRVNTEITKAPLSASMIKRYDEHHQDLTLLKALVRQQLPEKYKEIFFDQSKNGYAGYIDGGASQEEFYKFIKPILEKMDGTEELLVKLNREDLLRKQRTFDNGSIPHQIHLGELHAILRRQEDFYPFLKDNREKIEKILTFRIPYYVGPLARGNSRFAWMTRKSEETITPWNFEEVVDKGASAQSFIERMTNFDKNLPNEKVLPKHSLLYEYFTVYNELTKVKYVTEGMRKPAFLSGEQKKAIVDLLFKTNRKVTVKQLKEDYFKKIECFDSVEISGVEDRFNASLGTYHDLLKIIKDKDFLDNEENEDILEDIVLTLTLFEDREMIEERLKTYAHLFDDKVMKQLKRRRYTGWGRLSRKLINGIRDKQSGKTILDFLKSDGFANRNFMQLIHDDSLTFKEDIQKAQVSGQGDSLHEHIANLAGSPAIKKGILQTVKVVDELVKVMGRHKPENIVIEMARENQTTQKGQKNSRERMKRIEEGIKELGSQILKEHPVENTQLQNEKLYLYYLQNGRDMYVDQELDINRLSDYDVDHIVPQSFLKDDSIDNKVLTRSDKARGKSDNVPSEEVVKKMKNYWRQLLNAKLITQRKFDNLTKAERGGLSELDKAGFIKRQLVETRQITKHVAQILDSRMNTKYDENDKLIREVKVITLKSKLVSDFRKDFQFYKVREINNYHHAHDAYLNAVVGTALIKKYPKLESEFVYGDYKVYDVRKMIAKSEQEIGKATAKYFFYSNIMNFFKTEITLANGEIRKRPLIETNGETGEIVWDKGRDFATVRKVLSMPQVNIVKKTEVQTGGFSKESILPKRNSDKLIARKKDWDPKKYGGFDSPTVAYSVLVVAKVEKGKSKKLKSVKELLGITIMERSSFEKNPIDFLEAKGYKEVKKDLIIKLPKYSLFELENGRKRMLASAGELQKGNELALPSKYVNFLYLASHYEKLKGSPEDNEQKQLFVEQHKHYLDEIIEQISEFSKRVILADANLDKVLSAYNKHRDKPIREQAENIIHLFTLTNLGAPAAFKYFDTTIDRKRYTSTKEVLDATLIHQSITGLYETRIDLSQLGGDGGGGGGSEAAAKGGGGSGGTLQLEEEYRLFEPESTQKQEMDIWLKNFPQAWAETGGMGTAHCQAPVLIQLKATATPISIRQYPMPHEAYQGIKPHIRRMLDQGILKPCQSPWNTPLLPVKKPGTEDYRPVQDLREVNKRVEDIHPTVPNPYNLLSTLPPSHPWYTVLDLKDAFFCLRLHSESQLLFAFEWRDPEIGLSGQLTWTRLPQGFKNSPTLFNEALHSDLADFRVRYPALVLLQYVDDLLLAAATRTECLEGTKALLETLGNKGYRASAKKAQICLQEVTYLGYSLKDGQRWLTKARKEAILSIPVPKNSRQVREFLGTAGYCRLWIPGFAELAAPLYPLTRPGTLFQWGTEQQLAFEDIKKALLSSPALGLPDITKPFELFIDENSGFAKGVLVQKLGPWKRPVAYLSKKLDTVASGWPPCLRMVAAIAILVKDAGKLTLGQPLTILTSHPVEALVRQPPNKWLSNARMTHYQAMLLDAERVHFGPTVSLNPATLLPLPSGGNHHDCLQILAETHGTRPDLTDQPLPDADLTWYTDGSSFIRNGEREAGAAVTTESEVIWAAPLPPGTSAQRAELIALTQALKMAEGKKLTVYTDSRYAFATTHVHGEIYRRRGWLTSEGKEIKNKNEILALLEALFLPKRLSIIHCPGHQKGDSPQAKGNRLADDTAKKAATETHSSLTVLPAGKRTADGSEFEKRTADGSEFESPKKKAKVE

SEQ ID NO: 7671 - protein, 2180 aa, synthetic construct
MPAAKRVKLDGGDKKYSIGLDIGTNSVGWAVITDEYKVPSKKFKVLGNTDRHSIKKNLIGALLFDSGETAEATRLKRTARRRYTRRKNRICYLQEIFSNEMAKVDDSFFHRLEESFLVEEDKKHERHPIFGNIVDEVAYHEKYPTIYHLRKKLVDSTDKADLRLIYLALAHMIKFRGHFLIEGDLNPDNSDVDKLFIQLVQTYNQLFEENPINASGVDAKAILSARLSKSRRLENLIAQLPGEKKNGLFGNLIALSLGLTPNFKSNFDLAEDAKLQLSKDTYDDDLDNLLAQIGDQYADLFLAAKNLSDAILLSDILRVNTEITKAPLSASMIKRYDEHHQDLTLLKALVRQQLPEKYKEIFFDQSKNGYAGYIDGGASQEEFYKFIKPILEKMDGTEELLVKLNREDLLRKQRTFDNGSIPHQIHLGELHAILRRQEDFYPFLKDNREKIEKILTFRIPYYVGPLARGNSRFAWMTRKSEETITPWNFEEVVDKGASAQSFIERMTNFDKNLPNEKVLPKHSLLYEYFTVYNELTKVKYVTEGMRKPAFLSGEQKKAIVDLLFKTNRKVTVKQLKEDYFKKIECFDSVEISGVEDRFNASLGTYHDLLKIIKDKDFLDNEENEDILEDIVLTLTLFEDREMIEERLKTYAHLFDDKVMKQLKRRRYTGWGRLSRKLINGIRDKQSGKTILDFLKSDGFANRNFMQLIHDDSLTFKEDIQKAQVSGQGDSLHEHIANLAGSPAIKKGILQTVKVVDELVKVMGRHKPENIVIEMARENQTTQKGQKNSRERMKRIEEGIKELGSQILKEHPVENTQLQNEKLYLYYLQNGRDMYVDQELDINRLSDYDVDHIVPQSFLKDDSIDNKVLTRSDKARGKSDNVPSEEVVKKMKNYWRQLLNAKLITQRKFDNLTKAERGGLSELDKAGFIKRQLVETRQITKHVAQILDSRMNTKYDENDKLIREVKVITLKSKLVSDFRKDFQFYKVREINNYHHAHDAYLNAVVGTALIKKYPKLESEFVYGDYKVYDVRKMIAKSEQEIGKATAKYFFYSNIMNFFKTEITLANGEIRKRPLIETNGETGEIVWDKGRDFATVRKVLSMPQVNIVKKTEVQTGGFSKESILPKRNSDKLIARKKDWDPKKYGGFDSPTVAYSVLVVAKVEKGKSKKLKSVKELLGITIMERSSFEKNPIDFLEAKGYKEVKKDLIIKLPKYSLFELENGRKRMLASAGELQKGNELALPSKYVNFLYLASHYEKLKGSPEDNEQKQLFVEQHKHYLDEIIEQISEFSKRVILADANLDKVLSAYNKHRDKPIREQAENIIHLFTLTNLGAPAAFKYFDTTIDRKRYTSTKEVLDATLIHQSITGLYETRIDLSQLGGDGGGGGGSEAAAKGGGGSGGMNPLQLLQPLPAEIKGTKLLAHWNSGATITCIPESFLEDEQPIKKTLIKTIHGEKQQNVYYVTFKVKGRKVEAEVIASPYEYILLSPTDVPWLTQQPLQLTILVPLQEYQEKILSKTALPEDQKQQLKTLFVKYDNLWQHWENQVGHRKIRPHNIATGDYPPRPQKQYPINPKAKPSIQIVIDDLLKQGVLTPQNSTMNTPVYPVPKPDGRWRMVLDYREVNKTIPLTAAQNQHSAGILATIVRQKYKTTLDLANGFWAHPITPESYWLTAFTWQGKQYCWTRLPQGFLNSPALFNADVVDLLKEIPNVQVYVDDIYLSHDDPKEHVQQLEKVFQILLQAGYVVSLKKSEIGQKTVEFLGFNITKEGRGLTDTFKTKLLNITPPKDLKQLQSILGKLNFARNFIPNFAELVQPLYNLIAPAKGKYIEWSEENTKQLNMVIEALNTASNLEERLPEQRLVIKVNTSPSAGYVRYYNETGKKPIMYLNYVFSKAELKFSMLEKLLTTMHKALIKAMDLAMGQEILVYSPIVSMTKIQKTPLPERKALPIRWITWMTYLEDPRIQFHYDKTLPELKHIPDVYTSSQSPVKHPSQYEGVFYTDGSAIKSPDPTKSNNAGMGIVHATYKPEYQVLNQWSIPLGNHTAQMAEIAAVEFACKKALKIPGPVLVITDSFYVAESANKELPYWKSNGFVNNKKKPLKHISKWKSIAECLSMKPDITIQHEKGISLQIPVFILKGNALADKLATQGSYVVNAGKRTADGSEFEKRTADGSEFESPKKKAKVE

SEQ ID NO: 7672 - protein, 2098 aa, synthetic construct
MPAAKRVKLDGGDKKYSIGLDIGTNSVGWAVITDEYKVPSKKFKVLGNTDRHSIKKNLIGALLFDSGETAEATRLKRTARRRYTRRKNRICYLQEIFSNEMAKVDDSFFHRLEESFLVEEDKKHERHPIFGNIVDEVAYHEKYPTIYHLRKKLVDSTDKADLRLIYLALAHMIKFRGHFLIEGDLNPDNSDVDKLFIQLVQTYNQLFEENPINASGVDAKAILSARLSKSRRLENLIAQLPGEKKNGLFGNLIALSLGLTPNFKSNFDLAEDAKLQLSKDTYDDDLDNLLAQIGDQYADLFLAAKNLSDAILLSDILRVNTEITKAPLSASMIKRYDEHHQDLTLLKALVRQQLPEKYKEIFFDQSKNGYAGYIDGGASQEEFYKFIKPILEKMDGTEELLVKLNREDLLRKQRTFDNGSIPHQIHLGELHAILRRQEDFYPFLKDNREKIEKILTFRIPYYVGPLARGNSRFAWMTRKSEETITPWNFEEVVDKGASAQSFIERMTNFDKNLPNEKVLPKHSLLYEYFTVYNELTKVKYVTEGMRKPAFLSGEQKKAIVDLLFKTNRKVTVKQLKEDYFKKIECFDSVEISGVEDRFNASLGTYHDLLKIIKDKDFLDNEENEDILEDIVLTLTLFEDREMIEERLKTYAHLFDDKVMKQLKRRRYTGWGRLSRKLINGIRDKQSGKTILDFLKSDGFANRNFMQLIHDDSLTFKEDIQKAQVSGQGDSLHEHIANLAGSPAIKKGILQTVKVVDELVKVMGRHKPENIVIEMARENQTTQKGQKNSRERMKRIEEGIKELGSQILKEHPVENTQLQNEKLYLYYLQNGRDMYVDQELDINRLSDYDVDHIVPQSFLKDDSIDNKVLTRSDKARGKSDNVPSEEVVKKMKNYWRQLLNAKLITQRKFDNLTKAERGGLSELDKAGFIKRQLVETRQITKHVAQILDSRMNTKYDENDKLIREVKVITLKSKLVSDFRKDFQFYKVREINNYHHAHDAYLNAVVGTALIKKYPKLESEFVYGDYKVYDVRKMIAKSEQEIGKATAKYFFYSNIMNFFKTEITLANGEIRKRPLIETNGETGEIVWDKGRDFATVRKVLSMPQVNIVKKTEVQTGGFSKESILPKRNSDKLIARKKDWDPKKYGGFDSPTVAYSVLVVAKVEKGKSKKLKSVKELLGITIMERSSFEKNPIDFLEAKGYKEVKKDLIIKLPKYSLFELENGRKRMLASAGELQKGNELALPSKYVNFLYLASHYEKLKGSPEDNEQKQLFVEQHKHYLDEIIEQISEFSKRVILADANLDKVLSAYNKHRDKPIREQAENIIHLFTLTNLGAPAAFKYFDTTIDRKRYTSTKEVLDATLIHQSITGLYETRIDLSQLGGDGGGGGGSEAAAKGGGGSGGVLNLEEEYRLHEKPVPSSIDPSWLQLFPTVWAERAGMGLANQVPPVVVELRSGASPVAVRQYPMSKEAREGIRPHIQKFLDLGVLVPCRSPWNTPLLPVKKPGTNDYRPVQDLREINKRVQDIHPTVPNPYNLLSSLPPSYTWYSVLDLKDAFFCLRLHPNSQPLFAFEWKDPEKGNTGQLTWTRLPQGFKNSPTLFNEALHRDLAPFRALNPQVVLLQYVDDLLVAAPTYEDCKKGTQKLLQELSKLGYRVSAKKAQLCQREVTYLGYLLKEGKRWLTPARKATVMKIPVPTTPRQVREFLGKAGFCRLFIPGFASLAAPLYPLTKPSIPFIWTEEHQQAFDHIKKALLSAPALALPDLTKPFTLYIDERAGVARGVLTQTLGPWRRPVAYLSKKLDPVASGWPTCLKAVAAVALLLKDADKLTLGQNVTVIASHSLESIVRQPPDRWMTNARMTHYQSLLLNERVSFAPPAVLNPATLLPVESEATPVHRCSEILAEETGTRRDLEDQPLPGVPTWYTDGSSFITEGKRRAGAPIVDGKRTVWASSLPEGTSAQKAELVALTQALRLAEGKNINIYTDSRYAFATAHIHGAIYKQRGWLTSAGKDIKNKEEILALLEAIHLPRRVAIIHCPGHQRGSNPVATGNRRADEAAKQAALSTRVLAGTTKPAGKRTADGSEFEKRTADGSEFESPKKKAKVE

SEQ ID NO: 7673 - protein, 2017 aa, synthetic construct
MPAAKRVKLDGGDKKYSIGLDIGTNSVGWAVITDEYKVPSKKFKVLGNTDRHSIKKNLIGALLFDSGETAEATRLKRTARRRYTRRKNRICYLQEIFSNEMAKVDDSFFHRLEESFLVEEDKKHERHPIFGNIVDEVAYHEKYPTIYHLRKKLVDSTDKADLRLIYLALAHMIKFRGHFLIEGDLNPDNSDVDKLFIQLVQTYNQLFEENPINASGVDAKAILSARLSKSRRLENLIAQLPGEKKNGLFGNLIALSLGLTPNFKSNFDLAEDAKLQLSKDTYDDDLDNLLAQIGDQYADLFLAAKNLSDAILLSDILRVNTEITKAPLSASMIKRYDEHHQDLTLLKALVRQQLPEKYKEIFFDQSKNGYAGYIDGGASQEEFYKFIKPILEKMDGTEELLVKLNREDLLRKQRTFDNGSIPHQIHLGELHAILRRQEDFYPFLKDNREKIEKILTFRIPYYVGPLARGNSRFAWMTRKSEETITPWNFEEVVDKGASAQSFIERMTNFDKNLPNEKVLPKHSLLYEYFTVYNELTKVKYVTEGMRKPAFLSGEQKKAIVDLLFKTNRKVTVKQLKEDYFKKIECFDSVEISGVEDRFNASLGTYHDLLKIIKDKDFLDNEENEDILEDIVLTLTLFEDREMIEERLKTYAHLFDDKVMKQLKRRRYTGWGRLSRKLINGIRDKQSGKTILDFLKSDGFANRNFMQLIHDDSLTFKEDIQKAQVSGQGDSLHEHIANLAGSPAIKKGILQTVKVVDELVKVMGRHKPENIVIEMARENQTTQKGQKNSRERMKRIEEGIKELGSQILKEHPVENTQLQNEKLYLYYLQNGRDMYVDQELDINRLSDYDVDHIVPQSFLKDDSIDNKVLTRSDKARGKSDNVPSEEVVKKMKNYWRQLLNAKLITQRKFDNLTKAERGGLSELDKAGFIKRQLVETRQITKHVAQILDSRMNTKYDENDKLIREVKVITLKSKLVSDFRKDFQFYKVREINNYHHAHDAYLNAVVGTALIKKYPKLESEFVYGDYKVYDVRKMIAKSEQEIGKATAKYFFYSNIMNFFKTEITLANGEIRKRPLIETNGETGEIVWDKGRDFATVRKVLSMPQVNIVKKTEVQTGGFSKESILPKRNSDKLIARKKDWDPKKYGGFDSPTVAYSVLVVAKVEKGKSKKLKSVKELLGITIMERSSFEKNPIDFLEAKGYKEVKKDLIIKLPKYSLFELENGRKRMLASAGELQKGNELALPSKYVNFLYLASHYEKLKGSPEDNEQKQLFVEQHKHYLDEIIEQISEFSKRVILADANLDKVLSAYNKHRDKPIREQAENIIHLFTLTNLGAPAAFKYFDTTIDRKRYTSTKEVLDATLIHQSITGLYETRIDLSQLGGDGGGGGGSEAAAKGGGGSGGAVLGLEHLPRPPEISQFPLNPERLQALQHLVRKALEAGHIEPYTGPGNNPVFPVKKANGTWRFIHDLRATNSLTIDLSSSSPGPPDLSSLPTTLAHLQTIDLKDAFFQIPLPKQFQPYFAFTVPQQCNYGPGTRYAWRVLPQGFKNSPTLFQMQLAHILQPIRQAFPQCTILQYMDDILLASPSHADLQLLSEATMASLISHGLPVSENKTQQTPGTIKFLGQIISPNHLTYDAVPKVPIRSRWALPELQALLGEIQWVSKGTPTLRQPLHSLYCALQPHTDPRDQIYLNPSQVQSLVQLRQALSQNCRSRLVQTLPLLGAIMLTLTGTTTVVFQSKQQWPLVWLHAPLPHTSQCPWGQLLASAVLLLDKYTLQSYGLLCQTIHHNISTQTFNQFIQTSDHPSVPILLHHSHRFKNLGAQTGELWNTFLKTTAPLAPVKALMPVFTLSPVIINTAPCLFSDGSTSQAAYILWDKHILSQRSFPLPPPHKSAQRAELLGLLHGLSSARSWRCLNIFLDSKYLYHYLRTLALGTFQGRSSQAPFQALLPRLLSRKVVYLHHVRSHTNLPDPISRLNALTDALLITPVLQLAGKRTADGSEFEKRTADGSEFESPKKKAKVE

SEQ ID NO: 7674 - protein, 2100 aa, synthetic construct
MPAAKRVKLDGGDKKYSIGLDIGTNSVGWAVITDEYKVPSKKFKVLGNTDRHSIKKNLIGALLFDSGETAEATRLKRTARRRYTRRKNRICYLQEIFSNEMAKVDDSFFHRLEESFLVEEDKKHERHPIFGNIVDEVAYHEKYPTIYHLRKKLVDSTDKADLRLIYLALAHMIKFRGHFLIEGDLNPDNSDVDKLFIQLVQTYNQLFEENPINASGVDAKAILSARLSKSRRLENLIAQLPGEKKNGLFGNLIALSLGLTPNFKSNFDLAEDAKLQLSKDTYDDDLDNLLAQIGDQYADLFLAAKNLSDAILLSDILRVNTEITKAPLSASMIKRYDEHHQDLTLLKALVRQQLPEKYKEIFFDQSKNGYAGYIDGGASQEEFYKFIKPILEKMDGTEELLVKLNREDLLRKQRTFDNGSIPHQIHLGELHAILRRQEDFYPFLKDNREKIEKILTFRIPYYVGPLARGNSRFAWMTRKSEETITPWNFEEVVDKGASAQSFIERMTNFDKNLPNEKVLPKHSLLYEYFTVYNELTKVKYVTEGMRKPAFLSGEQKKAIVDLLFKTNRKVTVKQLKEDYFKKIECFDSVEISGVEDRFNASLGTYHDLLKIIKDKDFLDNEENEDILEDIVLTLTLFEDREMIEERLKTYAHLFDDKVMKQLKRRRYTGWGRLSRKLINGIRDKQSGKTILDFLKSDGFANRNFMQLIHDDSLTFKEDIQKAQVSGQGDSLHEHIANLAGSPAIKKGILQTVKVVDELVKVMGRHKPENIVIEMARENQTTQKGQKNSRERMKRIEEGIKELGSQILKEHPVENTQLQNEKLYLYYLQNGRDMYVDQELDINRLSDYDVDHIVPQSFLKDDSIDNKVLTRSDKARGKSDNVPSEEVVKKMKNYWRQLLNAKLITQRKFDNLTKAERGGLSELDKAGFIKRQLVETRQITKHVAQILDSRMNTKYDENDKLIREVKVITLKSKLVSDFRKDFQFYKVREINNYHHAHDAYLNAVVGTALIKKYPKLESEFVYGDYKVYDVRKMIAKSEQEIGKATAKYFFYSNIMNFFKTEITLANGEIRKRPLIETNGETGEIVWDKGRDFATVRKVLSMPQVNIVKKTEVQTGGFSKESILPKRNSDKLIARKKDWDPKKYGGFDSPTVAYSVLVVAKVEKGKSKKLKSVKELLGITIMERSSFEKNPIDFLEAKGYKEVKKDLIIKLPKYSLFELENGRKRMLASAGELQKGNELALPSKYVNFLYLASHYEKLKGSPEDNEQKQLFVEQHKHYLDEIIEQISEFSKRVILADANLDKVLSAYNKHRDKPIREQAENIIHLFTLTNLGAPAAFKYFDTTIDRKRYTSTKEVLDATLIHQSITGLYETRIDLSQLGGDGGGGGGSEAAAKGGGGSGGTLNLEDEYRLYETSAEPEVSPGSTWLSDFPQAWAETGGMGLAVRQAPLIIPLKATSTPVSIKQYPMSQEAKLGIKPHIQRLLDQGILVPCQSPWNTPLLPVKKPGTNDYRPVQDLREVNKRVEDIHPTVPNPYNLLSGLPPSHRWYTVLDLKDAFFCLRLHPTSQPLFAFEWRDPGMGISGQLTWTRLPQGFKNSPTLFNEALHRDLADFRIQHPDLILLQYVDDILLAATSELDCQQGTRALLLTLGNLGYRASAKKAQLCQKQVKYLGYLLKEGQRWLTEARKETVMGQPTPKTPRQLREFLGKAGFCRLFIPGFAEMAAPLYPLTKPGTLFNWGPDQQKAYQEIKQALLTAPALGLPDLTKPFELFVDEKQGYAKGVLTQKLGPWRRPVAYLSKKLDPVAAGWPPCLRMVAAIAVLRKDAGKLTMGQPLVILAPHAVEALVKQPPDRWLSNARMTHYQAMLLDTDRVQFGPVVALNPATLLPLPEEGAPHDCLEILAETHGTRPDLTDQPIPDADHTWYTDGSSFLQEGQRKAGAAVTTETEVIWARALPAGTSAQRAELIALTQALKMAEGKRLNVYTDSRYAFATAHIHGEIYRRRGWLTSEGREIKNKSEILALLKALFLPKRLSIIHCLGHQKGDSAEARGNRLADQAAREAAIKTPPDTSTLLAGKRTADGSEFEKRTADGSEFESPKKKAKVE

SEQ ID NO: 7675 - protein, 2100 aa, synthetic construct
MPAAKRVKLDGGDKKYSIGLDIGTNSVGWAVITDEYKVPSKKFKVLGNTDRHSIKKNLIGALLFDSGETAEATRLKRTARRRYTRRKNRICYLQEIFSNEMAKVDDSFFHRLEESFLVEEDKKHERHPIFGNIVDEVAYHEKYPTIYHLRKKLVDSTDKADLRLIYLALAHMIKFRGHFLIEGDLNPDNSDVDKLFIQLVQTYNQLFEENPINASGVDAKAILSARLSKSRRLENLIAQLPGEKKNGLFGNLIALSLGLTPNFKSNFDLAEDAKLQLSKDTYDDDLDNLLAQIGDQYADLFLAAKNLSDAILLSDILRVNTEITKAPLSASMIKRYDEHHQDLTLLKALVRQQLPEKYKEIFFDQSKNGYAGYIDGGASQEEFYKFIKPILEKMDGTEELLVKLNREDLLRKQRTFDNGSIPHQIHLGELHAILRRQEDFYPFLKDNREKIEKILTFRIPYYVGPLARGNSRFAWMTRKSEETITPWNFEEVVDKGASAQSFIERMTNFDKNLPNEKVLPKHSLLYEYFTVYNELTKVKYVTEGMRKPAFLSGEQKKAIVDLLFKTNRKVTVKQLKEDYFKKIECFDSVEISGVEDRFNASLGTYHDLLKIIKDKDFLDNEENEDILEDIVLTLTLFEDREMIEERLKTYAHLFDDKVMKQLKRRRYTGWGRLSRKLINGIRDKQSGKTILDFLKSDGFANRNFMQLIHDDSLTFKEDIQKAQVSGQGDSLHEHIANLAGSPAIKKGILQTVKVVDELVKVMGRHKPENIVIEMARENQTTQKGQKNSRERMKRIEEGIKELGSQILKEHPVENTQLQNEKLYLYYLQNGRDMYVDQELDINRLSDYDVDHIVPQSFLKDDSIDNKVLTRSDKARGKSDNVPSEEVVKKMKNYWRQLLNAKLITQRKFDNLTKAERGGLSELDKAGFIKRQLVETRQITKHVAQILDSRMNTKYDENDKLIREVKVITLKSKLVSDFRKDFQFYKVREINNYHHAHDAYLNAVVGTALIKKYPKLESEFVYGDYKVYDVRKMIAKSEQEIGKATAKYFFYSNIMNFFKTEITLANGEIRKRPLIETNGETGEIVWDKGRDFATVRKVLSMPQVNIVKKTEVQTGGFSKESILPKRNSDKLIARKKDWDPKKYGGFDSPTVAYSVLVVAKVEKGKSKKLKSVKELLGITIMERSSFEKNPIDFLEAKGYKEVKKDLIIKLPKYSLFELENGRKRMLASAGELQKGNELALPSKYVNFLYLASHYEKLKGSPEDNEQKQLFVEQHKHYLDEIIEQISEFSKRVILADANLDKVLSAYNKHRDKPIREQAENIIHLFTLTNLGAPAAFKYFDTTIDRKRYTSTKEVLDATLIHQSITGLYETRIDLSQLGGDGGGGGGSEAAAKGGGGSGGTLGIEDEYRLHETSTEPDVSLGSTWLSDFPQAWAETGGMGLAVRQAPLIIPLKATSTPVSIQQYPMSHEARLGIKPHIQRLLDQGILVPCQSPWNTPLLPVKKPGTNDYRPVQDLREVNKRVEDIHPTVPNPYNLLSGLPPSHQWYTVLDLKDAFFCLRLHPTSQPLFAFEWRDPGMGISGQLTWTRLPQGFKNSPTLFNEALHRDLADFRIQHPDLILLQYVDDILLAATSELDCQQGTRALLQTLGDLGYRASAKKAQICQKQVKYLGYLLREGQRWLTEARKETVMGQPVPKTPRQLREFLGTAGFCRLWIPGFAEMAAPLYPLTKPGTLFSWGPDQQKAYQEIKQALLTAPALGLPDLTKPFELFVDEKQGYAKGVLTQKLGPWRRPVAYLSKKLDPVAAGWPPCLRMVAAIAVLTKDAGKLTMGQPLVILAPHAVEALVKQPPDRWLSNARMTHYQAMLLDTDRVQFGPVVALNPATLLPLPEEGAPHDCLEILAETHGTRPDLTDQPIPDADHTWYTDGSSFLQEGQRKAGAAVTTETEVIWAGALPAGTSAQRAELIALTQALKMAEGKRLNVYTDSRYAFATAHIHGEIYRRRGWLTSEGREIKNKSEILALLKALFLPKRLSIIHCLGHQKGDSAEARGNRLADQAAREAAIKTPPDTSTLLAGKRTADGSEFEKRTADGSEFESPKKKAKVE

SEQ ID NO: 7676 - protein, 2100 aa, synthetic construct
MPAAKRVKLDGGDKKYSIGLDIGTNSVGWAVITDEYKVPSKKFKVLGNTDRHSIKKNLIGALLFDSGETAEATRLKRTARRRYTRRKNRICYLQEIFSNEMAKVDDSFFHRLEESFLVEEDKKHERHPIFGNIVDEVAYHEKYPTIYHLRKKLVDSTDKADLRLIYLALAHMIKFRGHFLIEGDLNPDNSDVDKLFIQLVQTYNQLFEENPINASGVDAKAILSARLSKSRRLENLIAQLPGEKKNGLFGNLIALSLGLTPNFKSNFDLAEDAKLQLSKDTYDDDLDNLLAQIGDQYADLFLAAKNLSDAILLSDILRVNTEITKAPLSASMIKRYDEHHQDLTLLKALVRQQLPEKYKEIFFDQSKNGYAGYIDGGASQEEFYKFIKPILEKMDGTEELLVKLNREDLLRKQRTFDNGSIPHQIHLGELHAILRRQEDFYPFLKDNREKIEKILTFRIPYYVGPLARGNSRFAWMTRKSEETITPWNFEEVVDKGASAQSFIERMTNFDKNLPNEKVLPKHSLLYEYFTVYNELTKVKYVTEGMRKPAFLSGEQKKAIVDLLFKTNRKVTVKQLKEDYFKKIECFDSVEISGVEDRFNASLGTYHDLLKIIKDKDFLDNEENEDILEDIVLTLTLFEDREMIEERLKTYAHLFDDKVMKQLKRRRYTGWGRLSRKLINGIRDKQSGKTILDFLKSDGFANRNFMQLIHDDSLTFKEDIQKAQVSGQGDSLHEHIANLAGSPAIKKGILQTVKVVDELVKVMGRHKPENIVIEMARENQTTQKGQKNSRERMKRIEEGIKELGSQILKEHPVENTQLQNEKLYLYYLQNGRDMYVDQELDINRLSDYDVDHIVPQSFLKDDSIDNKVLTRSDKARGKSDNVPSEEVVKKMKNYWRQLLNAKLITQRKFDNLTKAERGGLSELDKAGFIKRQLVETRQITKHVAQILDSRMNTKYDENDKLIREVKVITLKSKLVSDFRKDFQFYKVREINNYHHAHDAYLNAVVGTALIKKYPKLESEFVYGDYKVYDVRKMIAKSEQEIGKATAKYFFYSNIMNFFKTEITLANGEIRKRPLIETNGETGEIVWDKGRDFATVRKVLSMPQVNIVKKTEVQTGGFSKESILPKRNSDKLIARKKDWDPKKYGGFDSPTVAYSVLVVAKVEKGKSKKLKSVKELLGITIMERSSFEKNPIDFLEAKGYKEVKKDLIIKLPKYSLFELENGRKRMLASAGELQKGNELALPSKYVNFLYLASHYEKLKGSPEDNEQKQLFVEQHKHYLDEIIEQISEFSKRVILADANLDKVLSAYNKHRDKPIREQAENIIHLFTLTNLGAPAAFKYFDTTIDRKRYTSTKEVLDATLIHQSITGLYETRIDLSQLGGDGGGGGGSEAAAKGGGGSGGTLNIEDEYRLHETSKEPDVSLGSTWLSDFPQAWAETGGMGLAVRQAPLIIPLKATSTPVSIKQYPMSQEARLGIKPHIQRLLDQGILVPCQSPWNTPLLPVKKPGTNDYRPVQDLREVNKRVEDIHPTVPNPYNLLSGLPPSHQWYTVLDLKDAFFCLRLHPTSQPLFAFEWRDPEMGISGQLTWTRLPQGFKNSPTLFNEALHRDLAGFRIQHPDLILLQYVDDLLLAATSELDCQQGTRALLQTLGDLGYRASAKKAQICQKQVKYLGYLLKEGQRWLTEARKETVMGQPIPKTPRQLREFLGTAGFCRLWIPGFAEMAAPLYPLTKPGTLFNWGPDQQKAFQEIKQALLTAPALGLPDLTKPFELFVDEKQGYAKGVLTQKLGPWRRPVAYLSKKLDPVAAGWPPCLRMVAAIAVLTKDAGKLTMGQPLVILAPHAVEALVKQPPDRWLSNARMTHYQALLLDTDRVQFGPVVALNPATLLPLPEEGLQHDCLDILAEAHGTRSDLMDQPLPDADHTWYTDGSSFLQEGQRKAGAAVTTETEVIWARALPAGTSAQRAELIALTQALKMAEGKKLNVYTDSRYAFATAHIHGEIYRRRGWLTSEGKEIKNKDEILALLKALFLPKRLSIIHCPGHQKGNSAEARGNRMADQAAREVATRETPETSTLLAGKRTADGSEFEKRTADGSEFESPKKKAKVE

SEQ ID NO: 7677 - protein, 2100 aa, synthetic construct
MPAAKRVKLDGGDKKYSIGLDIGTNSVGWAVITDEYKVPSKKFKVLGNTDRHSIKKNLIGALLFDSGETAEATRLKRTARRRYTRRKNRICYLQEIFSNEMAKVDDSFFHRLEESFLVEEDKKHERHPIFGNIVDEVAYHEKYPTIYHLRKKLVDSTDKADLRLIYLALAHMIKFRGHFLIEGDLNPDNSDVDKLFIQLVQTYNQLFEENPINASGVDAKAILSARLSKSRRLENLIAQLPGEKKNGLFGNLIALSLGLTPNFKSNFDLAEDAKLQLSKDTYDDDLDNLLAQIGDQYADLFLAAKNLSDAILLSDILRVNTEITKAPLSASMIKRYDEHHQDLTLLKALVRQQLPEKYKEIFFDQSKNGYAGYIDGGASQEEFYKFIKPILEKMDGTEELLVKLNREDLLRKQRTFDNGSIPHQIHLGELHAILRRQEDFYPFLKDNREKIEKILTFRIPYYVGPLARGNSRFAWMTRKSEETITPWNFEEVVDKGASAQSFIERMTNFDKNLPNEKVLPKHSLLYEYFTVYNELTKVKYVTEGMRKPAFLSGEQKKAIVDLLFKTNRKVTVKQLKEDYFKKIECFDSVEISGVEDRFNASLGTYHDLLKIIKDKDFLDNEENEDILEDIVLTLTLFEDREMIEERLKTYAHLFDDKVMKQLKRRRYTGWGRLSRKLINGIRDKQSGKTILDFLKSDGFANRNFMQLIHDDSLTFKEDIQKAQVSGQGDSLHEHIANLAGSPAIKKGILQTVKVVDELVKVMGRHKPENIVIEMARENQTTQKGQKNSRERMKRIEEGIKELGSQILKEHPVENTQLQNEKLYLYYLQNGRDMYVDQELDINRLSDYDVDHIVPQSFLKDDSIDNKVLTRSDKARGKSDNVPSEEVVKKMKNYWRQLLNAKLITQRKFDNLTKAERGGLSELDKAGFIKRQLVETRQITKHVAQILDSRMNTKYDENDKLIREVKVITLKSKLVSDFRKDFQFYKVREINNYHHAHDAYLNAVVGTALIKKYPKLESEFVYGDYKVYDVRKMIAKSEQEIGKATAKYFFYSNIMNFFKTEITLANGEIRKRPLIETNGETGEIVWDKGRDFATVRKVLSMPQVNIVKKTEVQTGGFSKESILPKRNSDKLIARKKDWDPKKYGGFDSPTVAYSVLVVAKVEKGKSKKLKSVKELLGITIMERSSFEKNPIDFLEAKGYKEVKKDLIIKLPKYSLFELENGRKRMLASAGELQKGNELALPSKYVNFLYLASHYEKLKGSPEDNEQKQLFVEQHKHYLDEIIEQISEFSKRVILADANLDKVLSAYNKHRDKPIREQAENIIHLFTLTNLGAPAAFKYFDTTIDRKRYTSTKEVLDATLIHQSITGLYETRIDLSQLGGDGGGGGGSEAAAKGGGGSGGTLNIEDEYRLHETSKGPDVPLGSTWLSDFPQAWAETGGMGLAVRQAPLIIPLKATSTPVSIKQYPMSQEARLGIKPHIQRLLDQGILVPCQSPWNTPLLPVKKPGTNDYRPVQDLREVNKRVEDIHPTVPNPYNLLSGLPPSHQWYTVLDLKDAFFCLRLHPTSQSLFAFEWRDPEMGISGQLTWTRLPQGFKNSPTLFNEALHRDLADFRIQHPDLILLQYVDDLLLAATSELDCQQGTRALLQTLGDLGYRASAKKAQICQKQVKYLGYLLKEGQRWLTEARKETVMGQPTPKTPRQLREFLGTAGFCRLWIPGFAEMAAPLYPLTKPGTLFEWGPDQQKAYQEIKQALLTAPALGLPDLTKPFELFVDEKQGYAKGVLTQKLGPWRRPVAYLSKKLDPVAAGWPPCLRMVAAIAVLTKDAGKLTMGQPLVILAPHAVEALVKQPPDRWLSNARMTHYQALLLDTDRVQFGPIVALNPATLLPLPEEGLQHDCLDILAEAHGTRPDLTDQPLPDADHTWYTDGSSFLQEGQRKAGAAVTTETEVVWAKALPAGTSAQRAELIALTQALKMAEGKKLNVYTDSRYAFATAHIHGEIYRRRGWLTSEGKEIKNKDEILALLKALFLPKRLSIIHCPGHQKGNRAEARGNRMADQAAREVATRETPETSTLLAGKRTADGSEFEKRTADGSEFESPKKKAKVE

SEQ ID NO: 7678 - protein, 2120 aa, synthetic construct
MPAAKRVKLDGGDKKYSIGLDIGTNSVGWAVITDEYKVPSKKFKVLGNTDRHSIKKNLIGALLFDSGETAEATRLKRTARRRYTRRKNRICYLQEIFSNEMAKVDDSFFHRLEESFLVEEDKKHERHPIFGNIVDEVAYHEKYPTIYHLRKKLVDSTDKADLRLIYLALAHMIKFRGHFLIEGDLNPDNSDVDKLFIQLVQTYNQLFEENPINASGVDAKAILSARLSKSRRLENLIAQLPGEKKNGLFGNLIALSLGLTPNFKSNFDLAEDAKLQLSKDTYDDDLDNLLAQIGDQYADLFLAAKNLSDAILLSDILRVNTEITKAPLSASMIKRYDEHHQDLTLLKALVRQQLPEKYKEIFFDQSKNGYAGYIDGGASQEEFYKFIKPILEKMDGTEELLVKLNREDLLRKQRTFDNGSIPHQIHLGELHAILRRQEDFYPFLKDNREKIEKILTFRIPYYVGPLARGNSRFAWMTRKSEETITPWNFEEVVDKGASAQSFIERMTNFDKNLPNEKVLPKHSLLYEYFTVYNELTKVKYVTEGMRKPAFLSGEQKKAIVDLLFKTNRKVTVKQLKEDYFKKIECFDSVEISGVEDRFNASLGTYHDLLKIIKDKDFLDNEENEDILEDIVLTLTLFEDREMIEERLKTYAHLFDDKVMKQLKRRRYTGWGRLSRKLINGIRDKQSGKTILDFLKSDGFANRNFMQLIHDDSLTFKEDIQKAQVSGQGDSLHEHIANLAGSPAIKKGILQTVKVVDELVKVMGRHKPENIVIEMARENQTTQKGQKNSRERMKRIEEGIKELGSQILKEHPVENTQLQNEKLYLYYLQNGRDMYVDQELDINRLSDYDVDHIVPQSFLKDDSIDNKVLTRSDKARGKSDNVPSEEVVKKMKNYWRQLLNAKLITQRKFDNLTKAERGGLSELDKAGFIKRQLVETRQITKHVAQILDSRMNTKYDENDKLIREVKVITLKSKLVSDFRKDFQFYKVREINNYHHAHDAYLNAVVGTALIKKYPKLESEFVYGDYKVYDVRKMIAKSEQEIGKATAKYFFYSNIMNFFKTEITLANGEIRKRPLIETNGETGEIVWDKGRDFATVRKVLSMPQVNIVKKTEVQTGGFSKESILPKRNSDKLIARKKDWDPKKYGGFDSPTVAYSVLVVAKVEKGKSKKLKSVKELLGITIMERSSFEKNPIDFLEAKGYKEVKKDLIIKLPKYSLFELENGRKRMLASAGELQKGNELALPSKYVNFLYLASHYEKLKGSPEDNEQKQLFVEQHKHYLDEIIEQISEFSKRVILADANLDKVLSAYNKHRDKPIREQAENIIHLFTLTNLGAPAAFKYFDTTIDRKRYTSTKEVLDATLIHQSITGLYETRIDLSQLGGDGGGGGGSEAAAKGGGGSGGVQEISDSRPMLHIYLNGRRFLGLLDTGADKTCIAGRDWPANWPIHQTESSLQGLGMACGVARSSQPLRWQHEDKSGIIHPFVIPTLPFTLWGRDIMKDIKVRLMTDSPDDSQDLMIGAIESNLFADQISWKSDQPVWLNQWPLKQEKLQALQQLVTEQLQLGHLEESNSPWNTPVFVIKKKSGKWRLLQDLRAVNATMHDMGALQPGLPSPPAVPKGWEIIIIDLQDCFFNIKLHPEDCKRFAFSVPSPNFKRPYQRFQWKVLPQGMKNSPTLCQKFVDKAILTVRDKYQDSYIVHYMDDILLAHPSRSIVDEILTSMIQALNKHGLVVSTEKIQKYDNLKYLGTHIQGDSVSYQKLQIRTDKLRTLNDFQKLLGNINWIRPFLKLTTGELKPLFEILNPDSNPISTRKLTPEACKALQLMNERLSTARVKRLDLSQPWSLCILKTEYTPTACLWQDGVVEWIHLPHISPKVITPYDIFCTQLIIKGRHRSKELFSKDPDYIVVPYTKVQFDLLLQEKEDWPISLLGFLGEVHFHLPKDPLLTFTLQTAIIFPHMTSTTPLEKGIVIFTDGSANGRSVTYIQGREPIIKENTQNTAQQAEIVAVITAFEEVSQPFNLYTDSKYVTGLFPEIETATLSPRTKIYTELKHLQRLIHKRQEKFYIGHIRGHTGLPGPLAQGNAYADSLTRILTAAGKRTADGSEFEKRTADGSEFESPKKKAKVE

SEQ ID NO: 7679 - protein, 2098 aa, synthetic construct
MPAAKRVKLDGGDKKYSIGLDIGTNSVGWAVITDEYKVPSKKFKVLGNTDRHSIKKNLIGALLFDSGETAEATRLKRTARRRYTRRKNRICYLQEIFSNEMAKVDDSFFHRLEESFLVEEDKKHERHPIFGNIVDEVAYHEKYPTIYHLRKKLVDSTDKADLRLIYLALAHMIKFRGHFLIEGDLNPDNSDVDKLFIQLVQTYNQLFEENPINASGVDAKAILSARLSKSRRLENLIAQLPGEKKNGLFGNLIALSLGLTPNFKSNFDLAEDAKLQLSKDTYDDDLDNLLAQIGDQYADLFLAAKNLSDAILLSDILRVNTEITKAPLSASMIKRYDEHHQDLTLLKALVRQQLPEKYKEIFFDQSKNGYAGYIDGGASQEEFYKFIKPILEKMDGTEELLVKLNREDLLRKQRTFDNGSIPHQIHLGELHAILRRQEDFYPFLKDNREKIEKILTFRIPYYVGPLARGNSRFAWMTRKSEETITPWNFEEVVDKGASAQSFIERMTNFDKNLPNEKVLPKHSLLYEYFTVYNELTKVKYVTEGMRKPAFLSGEQKKAIVDLLFKTNRKVTVKQLKEDYFKKIECFDSVEISGVEDRFNASLGTYHDLLKIIKDKDFLDNEENEDILEDIVLTLTLFEDREMIEERLKTYAHLFDDKVMKQLKRRRYTGWGRLSRKLINGIRDKQSGKTILDFLKSDGFANRNFMQLIHDDSLTFKEDIQKAQVSGQGDSLHEHIANLAGSPAIKKGILQTVKVVDELVKVMGRHKPENIVIEMARENQTTQKGQKNSRERMKRIEEGIKELGSQILKEHPVENTQLQNEKLYLYYLQNGRDMYVDQELDINRLSDYDVDHIVPQSFLKDDSIDNKVLTRSDKARGKSDNVPSEEVVKKMKNYWRQLLNAKLITQRKFDNLTKAERGGLSELDKAGFIKRQLVETRQITKHVAQILDSRMNTKYDENDKLIREVKVITLKSKLVSDFRKDFQFYKVREINNYHHAHDAYLNAVVGTALIKKYPKLESEFVYGDYKVYDVRKMIAKSEQEIGKATAKYFFYSNIMNFFKTEITLANGEIRKRPLIETNGETGEIVWDKGRDFATVRKVLSMPQVNIVKKTEVQTGGFSKESILPKRNSDKLIARKKDWDPKKYGGFDSPTVAYSVLVVAKVEKGKSKKLKSVKELLGITIMERSSFEKNPIDFLEAKGYKEVKKDLIIKLPKYSLFELENGRKRMLASAGELQKGNELALPSKYVNFLYLASHYEKLKGSPEDNEQKQLFVEQHKHYLDEIIEQISEFSKRVILADANLDKVLSAYNKHRDKPIREQAENIIHLFTLTNLGAPAAFKYFDTTIDRKRYTSTKEVLDATLIHQSITGLYETRIDLSQLGGDGGGGGGSEAAAKGGGGSGGVLNLEEEYRLHEKPVPSSIDPSWLQLFPTVWAERAGMGLANQVPPVVVELRSGASPVAVRQYPMSKEAREGIRPHIQRFLDLGVLVPCQSPWNTPLLPVKKPGTNDYRPVQDLREINKRVQDIHPTVPNPYNLLSSLPPSHTWYSVLDLKDAFFCLKLHPNSQPLFAFEWRDPEKGNTGQLTWTRLPQGFKNSPTLFNEALHRDLAPFRALNPQVVLLQYVDDLLVAAPTYRDCKEGTQKLLQELSKLGYRVSAKKAQLCQKEVTYLGYLLKEGKRWLTPARKATVMKIPPPTTPRQVREFLGTAGFCRLWIPGFASLAAPLYPLTKPSIPFIWTEEHQKAFDRIKEALLSAPALALPDLTKPFTLYVDERAGVARGVLTQTLGPWRRPVAYLSKKLDPVASGWPTCLKAVAAVALLLKDADKLTLGQNVTVIASHSLESIVRQPPDRWMTNARMTHYQSLLLNERVSFAPPAVLNPATLLPVESEATPVHRCSEILAEETGTRRDLKDQPLPGVPAWYTDGSSFIAEGKRRAGAAIVDGKRTVWASSLPEGTSAQKAELVALTQALRLAEGKDINIYTDSRYAFATAHIHGAIYKQRGWLTSAGKDIKNKEEILALLEAIHLPKRVAIIHCPGHQKGNDPVATGNRRADEAAKQAALSTRVLAETTKPAGKRTADGSEFEKRTADGSEFESPKKKAKVE

SEQ ID NO: 7680 - protein, 2102 aa, synthetic construct
MPAAKRVKLDGGDKKYSIGLDIGTNSVGWAVITDEYKVPSKKFKVLGNTDRHSIKKNLIGALLFDSGETAEATRLKRTARRRYTRRKNRICYLQEIFSNEMAKVDDSFFHRLEESFLVEEDKKHERHPIFGNIVDEVAYHEKYPTIYHLRKKLVDSTDKADLRLIYLALAHMIKFRGHFLIEGDLNPDNSDVDKLFIQLVQTYNQLFEENPINASGVDAKAILSARLSKSRRLENLIAQLPGEKKNGLFGNLIALSLGLTPNFKSNFDLAEDAKLQLSKDTYDDDLDNLLAQIGDQYADLFLAAKNLSDAILLSDILRVNTEITKAPLSASMIKRYDEHHQDLTLLKALVRQQLPEKYKEIFFDQSKNGYAGYIDGGASQEEFYKFIKPILEKMDGTEELLVKLNREDLLRKQRTFDNGSIPHQIHLGELHAILRRQEDFYPFLKDNREKIEKILTFRIPYYVGPLARGNSRFAWMTRKSEETITPWNFEEVVDKGASAQSFIERMTNFDKNLPNEKVLPKHSLLYEYFTVYNELTKVKYVTEGMRKPAFLSGEQKKAIVDLLFKTNRKVTVKQLKEDYFKKIECFDSVEISGVEDRFNASLGTYHDLLKIIKDKDFLDNEENEDILEDIVLTLTLFEDREMIEERLKTYAHLFDDKVMKQLKRRRYTGWGRLSRKLINGIRDKQSGKTILDFLKSDGFANRNFMQLIHDDSLTFKEDIQKAQVSGQGDSLHEHIANLAGSPAIKKGILQTVKVVDELVKVMGRHKPENIVIEMARENQTTQKGQKNSRERMKRIEEGIKELGSQILKEHPVENTQLQNEKLYLYYLQNGRDMYVDQELDINRLSDYDVDHIVPQSFLKDDSIDNKVLTRSDKARGKSDNVPSEEVVKKMKNYWRQLLNAKLITQRKFDNLTKAERGGLSELDKAGFIKRQLVETRQITKHVAQILDSRMNTKYDENDKLIREVKVITLKSKLVSDFRKDFQFYKVREINNYHHAHDAYLNAVVGTALIKKYPKLESEFVYGDYKVYDVRKMIAKSEQEIGKATAKYFFYSNIMNFFKTEITLANGEIRKRPLIETNGETGEIVWDKGRDFATVRKVLSMPQVNIVKKTEVQTGGFSKESILPKRNSDKLIARKKDWDPKKYGGFDSPTVAYSVLVVAKVEKGKSKKLKSVKELLGITIMERSSFEKNPIDFLEAKGYKEVKKDLIIKLPKYSLFELENGRKRMLASAGELQKGNELALPSKYVNFLYLASHYEKLKGSPEDNEQKQLFVEQHKHYLDEIIEQISEFSKRVILADANLDKVLSAYNKHRDKPIREQAENIIHLFTLTNLGAPAAFKYFDTTIDRKRYTSTKEVLDATLIHQSITGLYETRIDLSQLGGDGGEAAAKGGGGSEAAAKGGTAPLEEEYRLFLEAPIQNVTLLEQWKREIPKVWAEINPPGLASTQAPIHVQLLSTALPVRVRQYPITLEAKRSLRETIRKFRAAGILRPVHSPWNTPLLPVRKSGTSEYRMVQDLREVNKRVETIHPTVPNPYTLLSLLPPDRIWYSVLDLKDAFFCIPLAPESQLIFAFEWADAEEGESGQLTWTRLPQGFKNSPTLFDEALNRDLQGFRLDHPSVSLLQYVDDLLIAADTQAACLSATRDLLMTLAELGYRVSGKKAQLCQEEVTYLGFKIHKGSRSLSNSRTQAILQIPVPKTKRQVREFLGTIGYCRLWIPGFAELAQPLYAATRGGNDPLVWGEKEEEAFQSLKLALTQPPALALPSLDKPFQLFVEETSGAAKGVLTQALGPWKRPVAYLSKRLDPVAAGWPRCLRAIAAAALLTREASKLTFGQDIEITSSHNLESLLRSPPDKWLTNARITQYQVLLLDPPRVRFKQTAALNPATLLPETDDTLPIHHCLDTLDSLTSTRPDLTDQPLAQAEATLFTDGSSYIRDGKRYAGAAVVTLDSVIWAEPLPIGTSAQKAELIALTKALEWSKDKSVNIYTDSRYAFATLHVHGMIYRERGLLTAGGKAIKNAPEILALLTAVWLPKRVAVMHCKGHQKDDAPTSTGNRRADEVAREVAIRPLSTQATISAGKRTADGSEFEKRTADGSEFESPKKKAKVE

SEQ ID NO: 7681 - protein, 2098 aa, synthetic construct
MPAAKRVKLDGGDKKYSIGLDIGTNSVGWAVITDEYKVPSKKFKVLGNTDRHSIKKNLIGALLFDSGETAEATRLKRTARRRYTRRKNRICYLQEIFSNEMAKVDDSFFHRLEESFLVEEDKKHERHPIFGNIVDEVAYHEKYPTIYHLRKKLVDSTDKADLRLIYLALAHMIKFRGHFLIEGDLNPDNSDVDKLFIQLVQTYNQLFEENPINASGVDAKAILSARLSKSRRLENLIAQLPGEKKNGLFGNLIALSLGLTPNFKSNFDLAEDAKLQLSKDTYDDDLDNLLAQIGDQYADLFLAAKNLSDAILLSDILRVNTEITKAPLSASMIKRYDEHHQDLTLLKALVRQQLPEKYKEIFFDQSKNGYAGYIDGGASQEEFYKFIKPILEKMDGTEELLVKLNREDLLRKQRTFDNGSIPHQIHLGELHAILRRQEDFYPFLKDNREKIEKILTFRIPYYVGPLARGNSRFAWMTRKSEETITPWNFEEVVDKGASAQSFIERMTNFDKNLPNEKVLPKHSLLYEYFTVYNELTKVKYVTEGMRKPAFLSGEQKKAIVDLLFKTNRKVTVKQLKEDYFKKIECFDSVEISGVEDRFNASLGTYHDLLKIIKDKDFLDNEENEDILEDIVLTLTLFEDREMIEERLKTYAHLFDDKVMKQLKRRRYTGWGRLSRKLINGIRDKQSGKTILDFLKSDGFANRNFMQLIHDDSLTFKEDIQKAQVSGQGDSLHEHIANLAGSPAIKKGILQTVKVVDELVKVMGRHKPENIVIEMARENQTTQKGQKNSRERMKRIEEGIKELGSQILKEHPVENTQLQNEKLYLYYLQNGRDMYVDQELDINRLSDYDVDHIVPQSFLKDDSIDNKVLTRSDKARGKSDNVPSEEVVKKMKNYWRQLLNAKLITQRKFDNLTKAERGGLSELDKAGFIKRQLVETRQITKHVAQILDSRMNTKYDENDKLIREVKVITLKSKLVSDFRKDFQFYKVREINNYHHAHDAYLNAVVGTALIKKYPKLESEFVYGDYKVYDVRKMIAKSEQEIGKATAKYFFYSNIMNFFKTEITLANGEIRKRPLIETNGETGEIVWDKGRDFATVRKVLSMPQVNIVKKTEVQTGGFSKESILPKRNSDKLIARKKDWDPKKYGGFDSPTVAYSVLVVAKVEKGKSKKLKSVKELLGITIMERSSFEKNPIDFLEAKGYKEVKKDLIIKLPKYSLFELENGRKRMLASAGELQKGNELALPSKYVNFLYLASHYEKLKGSPEDNEQKQLFVEQHKHYLDEIIEQISEFSKRVILADANLDKVLSAYNKHRDKPIREQAENIIHLFTLTNLGAPAAFKYFDTTIDRKRYTSTKEVLDATLIHQSITGLYETRIDLSQLGGDGGEAAAKGGGGSEAAAKGGVLNLEEEYRLHEKPVPSSIDPSWLQLFPTVWAERAGMGLANQVPPVVVELRSGASPVAVRQYPMSKEAREGIRPHIQKFLDLGVLVPCRSPWNTPLLPVKKPGTNDYRPVQDLREINKRVQDIHPTVPNPYNLLSSLPPSYTWYSVLDLKDAFFCLRLHPNSQPLFAFEWKDPEKGNTGQLTWTRLPQGFKNSPTLFNEALHRDLAPFRALNPQVVLLQYVDDLLVAAPTYEDCKKGTQKLLQELSKLGYRVSAKKAQLCQREVTYLGYLLKEGKRWLTPARKATVMKIPVPTTPRQVREFLGTAGFCRLWIPGFASLAAPLYPLTKPSIPFIWTEEHQQAFDHIKKALLSAPALALPDLTKPFTLYIDERAGVARGVLTQTLGPWRRPVAYLSKKLDPVASGWPTCLKAVAAVALLLKDADKLTLGQNVTVIASHSLESIVRQPPDRWMTNARMTHYQSLLLNERVSFAPPAVLNPATLLPVESEATPVHRCSEILAEETGTRRDLEDQPLPGVPTWYTDGSSFITEGKRRAGAPIVDGKRTVWASSLPEGTSAQKAELVALTQALRLAEGKNINIYTDSRYAFATAHIHGAIYKQRGWLTSAGKDIKNKEEILALLEAIHLPRRVAIIHCPGHQRGSNPVATGNRRADEAAKQAALSTRVLAGTTKPAGKRTADGSEFEKRTADGSEFESPKKKAKVE

SEQ ID NO: 7682 - protein, 2222 aa, synthetic construct
MPAAKRVKLDGGDKKYSIGLDIGTNSVGWAVITDEYKVPSKKFKVLGNTDRHSIKKNLIGALLFDSGETAEATRLKRTARRRYTRRKNRICYLQEIFSNEMAKVDDSFFHRLEESFLVEEDKKHERHPIFGNIVDEVAYHEKYPTIYHLRKKLVDSTDKADLRLIYLALAHMIKFRGHFLIEGDLNPDNSDVDKLFIQLVQTYNQLFEENPINASGVDAKAILSARLSKSRRLENLIAQLPGEKKNGLFGNLIALSLGLTPNFKSNFDLAEDAKLQLSKDTYDDDLDNLLAQIGDQYADLFLAAKNLSDAILLSDILRVNTEITKAPLSASMIKRYDEHHQDLTLLKALVRQQLPEKYKEIFFDQSKNGYAGYIDGGASQEEFYKFIKPILEKMDGTEELLVKLNREDLLRKQRTFDNGSIPHQIHLGELHAILRRQEDFYPFLKDNREKIEKILTFRIPYYVGPLARGNSRFAWMTRKSEETITPWNFEEVVDKGASAQSFIERMTNFDKNLPNEKVLPKHSLLYEYFTVYNELTKVKYVTEGMRKPAFLSGEQKKAIVDLLFKTNRKVTVKQLKEDYFKKIECFDSVEISGVEDRFNASLGTYHDLLKIIKDKDFLDNEENEDILEDIVLTLTLFEDREMIEERLKTYAHLFDDKVMKQLKRRRYTGWGRLSRKLINGIRDKQSGKTILDFLKSDGFANRNFMQLIHDDSLTFKEDIQKAQVSGQGDSLHEHIANLAGSPAIKKGILQTVKVVDELVKVMGRHKPENIVIEMARENQTTQKGQKNSRERMKRIEEGIKELGSQILKEHPVENTQLQNEKLYLYYLQNGRDMYVDQELDINRLSDYDVDHIVPQSFLKDDSIDNKVLTRSDKARGKSDNVPSEEVVKKMKNYWRQLLNAKLITQRKFDNLTKAERGGLSELDKAGFIKRQLVETRQITKHVAQILDSRMNTKYDENDKLIREVKVITLKSKLVSDFRKDFQFYKVREINNYHHAHDAYLNAVVGTALIKKYPKLESEFVYGDYKVYDVRKMIAKSEQEIGKATAKYFFYSNIMNFFKTEITLANGEIRKRPLIETNGETGEIVWDKGRDFATVRKVLSMPQVNIVKKTEVQTGGFSKESILPKRNSDKLIARKKDWDPKKYGGFDSPTVAYSVLVVAKVEKGKSKKLKSVKELLGITIMERSSFEKNPIDFLEAKGYKEVKKDLIIKLPKYSLFELENGRKRMLASAGELQKGNELALPSKYVNFLYLASHYEKLKGSPEDNEQKQLFVEQHKHYLDEIIEQISEFSKRVILADANLDKVLSAYNKHRDKPIREQAENIIHLFTLTNLGAPAAFKYFDTTIDRKRYTSTKEVLDATLIHQSITGLYETRIDLSQLGGDGGEAAAKGGGGSEAAAKGGTLGDQGSRGSDPLPEPRVTLTVEGIPTEFLVNTGAEHSVLTKPMGKMGSKRTVVAGATGSKVYPWTTKRLLKIGQKQVTHSFLVIPECPAPLLGRDLLTKLKAQIQFSTEGPQVTWEDRPAMCLVLNLEEEYRLHEKPVPPSIDPSWLQLFPMVWAEKAGMGLANQVPPVVVELKSDASPVAVRQYPMSKEAREGIRPHIQRFLDLGILVPCQSPWNTPLLPVKKPGTNDYRPVQDLREVNKRVQDIHPTVPNPYNLLSSLPPSHTWYSVLDLKDAFFCLKLHPNSQPLFAFEWRDPEKGNTGQLTWTRLPQGFKNSPTLFNEALHRDLASFRALNPQVVMLQYVDDLLVAAPTYRDCKEGTRRLLQELSKLGYRVSAKKAQLCREEVTYLGYLLKGGKRWLTPARKATVMKIPTPTTPRQVREFLGTAGFCRLWIPGFASLAAPLYPLTRPKVPFTWTEAHQEAFGRIKEALLSAPALALPDLTKPFALYVDEKEGVARGVLTQTLGPWRRPVAYLSKKLDPVASGWPTCLKAIAAVALLLKDADKLTLGQNVLVIAPHNLESIVRQPPDRWMTNARMTHYQSLLLNERVSFAPPAILNPATLLPVESDDTPIHICSEILAEETGTRPDLRDQPLPGVPAWYTDGSSFIMDGRRQAGAAIVDNKRTVWASNLPEGTSAQKAELIALTQALRLAEGKSINIYTDSRYAFATAHVHGAIYKQRGWLTSAGKDIKNKEEILALLEAIHLPKRVAIIHCPGHQRGTDPVATGNRKADEAAKQAAQSTRILTETTKNAGKRTADGSEFEKRTADGSEFESPKKKAKVE

SEQ ID NO: 7683 - protein, 2100 aa, synthetic construct
MPAAKRVKLDGGDKKYSIGLDIGTNSVGWAVITDEYKVPSKKFKVLGNTDRHSIKKNLIGALLFDSGETAEATRLKRTARRRYTRRKNRICYLQEIFSNEMAKVDDSFFHRLEESFLVEEDKKHERHPIFGNIVDEVAYHEKYPTIYHLRKKLVDSTDKADLRLIYLALAHMIKFRGHFLIEGDLNPDNSDVDKLFIQLVQTYNQLFEENPINASGVDAKAILSARLSKSRRLENLIAQLPGEKKNGLFGNLIALSLGLTPNFKSNFDLAEDAKLQLSKDTYDDDLDNLLAQIGDQYADLFLAAKNLSDAILLSDILRVNTEITKAPLSASMIKRYDEHHQDLTLLKALVRQQLPEKYKEIFFDQSKNGYAGYIDGGASQEEFYKFIKPILEKMDGTEELLVKLNREDLLRKQRTFDNGSIPHQIHLGELHAILRRQEDFYPFLKDNREKIEKILTFRIPYYVGPLARGNSRFAWMTRKSEETITPWNFEEVVDKGASAQSFIERMTNFDKNLPNEKVLPKHSLLYEYFTVYNELTKVKYVTEGMRKPAFLSGEQKKAIVDLLFKTNRKVTVKQLKEDYFKKIECFDSVEISGVEDRFNASLGTYHDLLKIIKDKDFLDNEENEDILEDIVLTLTLFEDREMIEERLKTYAHLFDDKVMKQLKRRRYTGWGRLSRKLINGIRDKQSGKTILDFLKSDGFANRNFMQLIHDDSLTFKEDIQKAQVSGQGDSLHEHIANLAGSPAIKKGILQTVKVVDELVKVMGRHKPENIVIEMARENQTTQKGQKNSRERMKRIEEGIKELGSQILKEHPVENTQLQNEKLYLYYLQNGRDMYVDQELDINRLSDYDVDHIVPQSFLKDDSIDNKVLTRSDKARGKSDNVPSEEVVKKMKNYWRQLLNAKLITQRKFDNLTKAERGGLSELDKAGFIKRQLVETRQITKHVAQILDSRMNTKYDENDKLIREVKVITLKSKLVSDFRKDFQFYKVREINNYHHAHDAYLNAVVGTALIKKYPKLESEFVYGDYKVYDVRKMIAKSEQEIGKATAKYFFYSNIMNFFKTEITLANGEIRKRPLIETNGETGEIVWDKGRDFATVRKVLSMPQVNIVKKTEVQTGGFSKESILPKRNSDKLIARKKDWDPKKYGGFDSPTVAYSVLVVAKVEKGKSKKLKSVKELLGITIMERSSFEKNPIDFLEAKGYKEVKKDLIIKLPKYSLFELENGRKRMLASAGELQKGNELALPSKYVNFLYLASHYEKLKGSPEDNEQKQLFVEQHKHYLDEIIEQISEFSKRVILADANLDKVLSAYNKHRDKPIREQAENIIHLFTLTNLGAPAAFKYFDTTIDRKRYTSTKEVLDATLIHQSITGLYETRIDLSQLGGDGGEAAAKGGGGSEAAAKGGTLNLEDEYRLYETSAEPEVSPGSTWLSDFPQAWAETGGMGLAVRQAPLIIPLKATSTPVSIKQYPMSQEAKLGIKPHIQRLLDQGILVPCQSPWNTPLLPVKKPGTNDYRPVQDLREVNKRVEDIHPTVPNPYNLLSGLPPSHRWYTVLDLKDAFFCLRLHPTSQPLFAFEWRDPGMGISGQLTWTRLPQGFKNSPTLFNEALHRDLADFRIQHPDLILLQYVDDILLAATSELDCQQGTRALLLTLGNLGYRASAKKAQLCQKQVKYLGYLLKEGQRWLTEARKETVMGQPTPKTPRQLREFLGTAGFCRLWIPGFAEMAAPLYPLTKPGTLFNWGPDQQKAYQEIKQALLTAPALGLPDLTKPFELFVDEKQGYAKGVLTQKLGPWRRPVAYLSKKLDPVAAGWPPCLRMVAAIAVLRKDAGKLTMGQPLVILAPHAVEALVKQPPDRWLSNARMTHYQAMLLDTDRVQFGPVVALNPATLLPLPEEGAPHDCLEILAETHGTRPDLTDQPIPDADHTWYTDGSSFLQEGQRKAGAAVTTETEVIWARALPAGTSAQRAELIALTQALKMAEGKRLNVYTDSRYAFATAHIHGEIYRRRGWLTSEGREIKNKSEILALLKALFLPKRLSIIHCLGHQKGDSAEARGNRLADQAAREAAIKTPPDTSTLLAGKRTADGSEFEKRTADGSEFESPKKKAKVE

SEQ ID NO: 7684 - protein, 2100 aa, synthetic construct
MPAAKRVKLDGGDKKYSIGLDIGTNSVGWAVITDEYKVPSKKFKVLGNTDRHSIKKNLIGALLFDSGETAEATRLKRTARRRYTRRKNRICYLQEIFSNEMAKVDDSFFHRLEESFLVEEDKKHERHPIFGNIVDEVAYHEKYPTIYHLRKKLVDSTDKADLRLIYLALAHMIKFRGHFLIEGDLNPDNSDVDKLFIQLVQTYNQLFEENPINASGVDAKAILSARLSKSRRLENLIAQLPGEKKNGLFGNLIALSLGLTPNFKSNFDLAEDAKLQLSKDTYDDDLDNLLAQIGDQYADLFLAAKNLSDAILLSDILRVNTEITKAPLSASMIKRYDEHHQDLTLLKALVRQQLPEKYKEIFFDQSKNGYAGYIDGGASQEEFYKFIKPILEKMDGTEELLVKLNREDLLRKQRTFDNGSIPHQIHLGELHAILRRQEDFYPFLKDNREKIEKILTFRIPYYVGPLARGNSRFAWMTRKSEETITPWNFEEVVDKGASAQSFIERMTNFDKNLPNEKVLPKHSLLYEYFTVYNELTKVKYVTEGMRKPAFLSGEQKKAIVDLLFKTNRKVTVKQLKEDYFKKIECFDSVEISGVEDRFNASLGTYHDLLKIIKDKDFLDNEENEDILEDIVLTLTLFEDREMIEERLKTYAHLFDDKVMKQLKRRRYTGWGRLSRKLINGIRDKQSGKTILDFLKSDGFANRNFMQLIHDDSLTFKEDIQKAQVSGQGDSLHEHIANLAGSPAIKKGILQTVKVVDELVKVMGRHKPENIVIEMARENQTTQKGQKNSRERMKRIEEGIKELGSQILKEHPVENTQLQNEKLYLYYLQNGRDMYVDQELDINRLSDYDVDHIVPQSFLKDDSIDNKVLTRSDKARGKSDNVPSEEVVKKMKNYWRQLLNAKLITQRKFDNLTKAERGGLSELDKAGFIKRQLVETRQITKHVAQILDSRMNTKYDENDKLIREVKVITLKSKLVSDFRKDFQFYKVREINNYHHAHDAYLNAVVGTALIKKYPKLESEFVYGDYKVYDVRKMIAKSEQEIGKATAKYFFYSNIMNFFKTEITLANGEIRKRPLIETNGETGEIVWDKGRDFATVRKVLSMPQVNIVKKTEVQTGGFSKESILPKRNSDKLIARKKDWDPKKYGGFDSPTVAYSVLVVAKVEKGKSKKLKSVKELLGITIMERSSFEKNPIDFLEAKGYKEVKKDLIIKLPKYSLFELENGRKRMLASAGELQKGNELALPSKYVNFLYLASHYEKLKGSPEDNEQKQLFVEQHKHYLDEIIEQISEFSKRVILADANLDKVLSAYNKHRDKPIREQAENIIHLFTLTNLGAPAAFKYFDTTIDRKRYTSTKEVLDATLIHQSITGLYETRIDLSQLGGDGGEAAAKGGGGSEAAAKGGTLGIEDEYRLHETSTEPDVSLGSTWLSDFPQAWAETGGMGLAVRQAPLIIPLKATSTPVSIQQYPMSHEARLGIKPHIQRLLDQGILVPCQSPWNTPLLPVKKPGTNDYRPVQDLREVNKRVEDIHPTVPNPYNLLSGLPPSHQWYTVLDLKDAFFCLRLHPTSQPLFAFEWRDPGMGISGQLTWTRLPQGFKNSPTLFNEALHRDLADFRIQHPDLILLQYVDDILLAATSELDCQQGTRALLQTLGDLGYRASAKKAQICQKQVKYLGYLLREGQRWLTEARKETVMGQPVPKTPRQLREFLGTAGFCRLWIPGFAEMAAPLYPLTKPGTLFSWGPDQQKAYQEIKQALLTAPALGLPDLTKPFELFVDEKQGYAKGVLTQKLGPWRRPVAYLSKKLDPVAAGWPPCLRMVAAIAVLTKDAGKLTMGQPLVILAPHAVEALVKQPPDRWLSNARMTHYQAMLLDTDRVQFGPVVALNPATLLPLPEEGAPHDCLEILAETHGTRPDLTDQPIPDADHTWYTDGSSFLQEGQRKAGAAVTTETEVIWAGALPAGTSAQRAELIALTQALKMAEGKRLNVYTDSRYAFATAHIHGEIYRRRGWLTSEGREIKNKSEILALLKALFLPKRLSIIHCLGHQKGDSAEARGNRLADQAAREAAIKTPPDTSTLLAGKRTADGSEFEKRTADGSEFESPKKKAKVE

SEQ ID NO: 7685 - protein, 2100 aa, synthetic construct
MPAAKRVKLDGGDKKYSIGLDIGTNSVGWAVITDEYKVPSKKFKVLGNTDRHSIKKNLIGALLFDSGETAEATRLKRTARRRYTRRKNRICYLQEIFSNEMAKVDDSFFHRLEESFLVEEDKKHERHPIFGNIVDEVAYHEKYPTIYHLRKKLVDSTDKADLRLIYLALAHMIKFRGHFLIEGDLNPDNSDVDKLFIQLVQTYNQLFEENPINASGVDAKAILSARLSKSRRLENLIAQLPGEKKNGLFGNLIALSLGLTPNFKSNFDLAEDAKLQLSKDTYDDDLDNLLAQIGDQYADLFLAAKNLSDAILLSDILRVNTEITKAPLSASMIKRYDEHHQDLTLLKALVRQQLPEKYKEIFFDQSKNGYAGYIDGGASQEEFYKFIKPILEKMDGTEELLVKLNREDLLRKQRTFDNGSIPHQIHLGELHAILRRQEDFYPFLKDNREKIEKILTFRIPYYVGPLARGNSRFAWMTRKSEETITPWNFEEVVDKGASAQSFIERMTNFDKNLPNEKVLPKHSLLYEYFTVYNELTKVKYVTEGMRKPAFLSGEQKKAIVDLLFKTNRKVTVKQLKEDYFKKIECFDSVEISGVEDRFNASLGTYHDLLKIIKDKDFLDNEENEDILEDIVLTLTLFEDREMIEERLKTYAHLFDDKVMKQLKRRRYTGWGRLSRKLINGIRDKQSGKTILDFLKSDGFANRNFMQLIHDDSLTFKEDIQKAQVSGQGDSLHEHIANLAGSPAIKKGILQTVKVVDELVKVMGRHKPENIVIEMARENQTTQKGQKNSRERMKRIEEGIKELGSQILKEHPVENTQLQNEKLYLYYLQNGRDMYVDQELDINRLSDYDVDHIVPQSFLKDDSIDNKVLTRSDKARGKSDNVPSEEVVKKMKNYWRQLLNAKLITQRKFDNLTKAERGGLSELDKAGFIKRQLVETRQITKHVAQILDSRMNTKYDENDKLIREVKVITLKSKLVSDFRKDFQFYKVREINNYHHAHDAYLNAVVGTALIKKYPKLESEFVYGDYKVYDVRKMIAKSEQEIGKATAKYFFYSNIMNFFKTEITLANGEIRKRPLIETNGETGEIVWDKGRDFATVRKVLSMPQVNIVKKTEVQTGGFSKESILPKRNSDKLIARKKDWDPKKYGGFDSPTVAYSVLVVAKVEKGKSKKLKSVKELLGITIMERSSFEKNPIDFLEAKGYKEVKKDLIIKLPKYSLFELENGRKRMLASAGELQKGNELALPSKYVNFLYLASHYEKLKGSPEDNEQKQLFVEQHKHYLDEIIEQISEFSKRVILADANLDKVLSAYNKHRDKPIREQAENIIHLFTLTNLGAPAAFKYFDTTIDRKRYTSTKEVLDATLIHQSITGLYETRIDLSQLGGDGGEAAAKGGGGSEAAAKGGTLNIEDEYRLHETSKGPDVPLGSTWLSDFPQAWAETGGMGLAVRQAPLIIPLKATSTPVSIKQYPMSQEARLGIKPHIQRLLDQGILVPCQSPWNTPLLPVKKPGTNDYRPVQDLREVNKRVEDIHPTVPNPYNLLSGLPPSHQWYTVLDLKDAFFCLRLHPTSQSLFAFEWRDPEMGISGQLTWTRLPQGFKNSPTLFNEALHRDLADFRIQHPDLILLQYVDDLLLAATSELDCQQGTRALLQTLGDLGYRASAKKAQICQKQVKYLGYLLKEGQRWLTEARKETVMGQPTPKTPRQLREFLGTAGFCRLWIPGFAEMAAPLYPLTKPGTLFEWGPDQQKAYQEIKQALLTAPALGLPDLTKPFELFVDEKQGYAKGVLTQKLGPWRRPVAYLSKKLDPVAAGWPPCLRMVAAIAVLTKDAGKLTMGQPLVILAPHAVEALVKQPPDRWLSNARMTHYQALLLDTDRVQFGPIVALNPATLLPLPEEGLQHDCLDILAEAHGTRPDLTDQPLPDADHTWYTDGSSFLQEGQRKAGAAVTTETEVVWAKALPAGTSAQRAELIALTQALKMAEGKKLNVYTDSRYAFATAHIHGEIYRRRGWLTSEGKEIKNKDEILALLKALFLPKRLSIIHCPGHQKGNRAEARGNRMADQAAREVATRETPETSTLLAGKRTADGSEFEKRTADGSEFESPKKKAKVE

SEQ ID NO: 7686 - protein, 2100 aa, synthetic construct
MPAAKRVKLDGGDKKYSIGLDIGTNSVGWAVITDEYKVPSKKFKVLGNTDRHSIKKNLIGALLFDSGETAEATRLKRTARRRYTRRKNRICYLQEIFSNEMAKVDDSFFHRLEESFLVEEDKKHERHPIFGNIVDEVAYHEKYPTIYHLRKKLVDSTDKADLRLIYLALAHMIKFRGHFLIEGDLNPDNSDVDKLFIQLVQTYNQLFEENPINASGVDAKAILSARLSKSRRLENLIAQLPGEKKNGLFGNLIALSLGLTPNFKSNFDLAEDAKLQLSKDTYDDDLDNLLAQIGDQYADLFLAAKNLSDAILLSDILRVNTEITKAPLSASMIKRYDEHHQDLTLLKALVRQQLPEKYKEIFFDQSKNGYAGYIDGGASQEEFYKFIKPILEKMDGTEELLVKLNREDLLRKQRTFDNGSIPHQIHLGELHAILRRQEDFYPFLKDNREKIEKILTFRIPYYVGPLARGNSRFAWMTRKSEETITPWNFEEVVDKGASAQSFIERMTNFDKNLPNEKVLPKHSLLYEYFTVYNELTKVKYVTEGMRKPAFLSGEQKKAIVDLLFKTNRKVTVKQLKEDYFKKIECFDSVEISGVEDRFNASLGTYHDLLKIIKDKDFLDNEENEDILEDIVLTLTLFEDREMIEERLKTYAHLFDDKVMKQLKRRRYTGWGRLSRKLINGIRDKQSGKTILDFLKSDGFANRNFMQLIHDDSLTFKEDIQKAQVSGQGDSLHEHIANLAGSPAIKKGILQTVKVVDELVKVMGRHKPENIVIEMARENQTTQKGQKNSRERMKRIEEGIKELGSQILKEHPVENTQLQNEKLYLYYLQNGRDMYVDQELDINRLSDYDVDHIVPQSFLKDDSIDNKVLTRSDKARGKSDNVPSEEVVKKMKNYWRQLLNAKLITQRKFDNLTKAERGGLSELDKAGFIKRQLVETRQITKHVAQILDSRMNTKYDENDKLIREVKVITLKSKLVSDFRKDFQFYKVREINNYHHAHDAYLNAVVGTALIKKYPKLESEFVYGDYKVYDVRKMIAKSEQEIGKATAKYFFYSNIMNFFKTEITLANGEIRKRPLIETNGETGEIVWDKGRDFATVRKVLSMPQVNIVKKTEVQTGGFSKESILPKRNSDKLIARKKDWDPKKYGGFDSPTVAYSVLVVAKVEKGKSKKLKSVKELLGITIMERSSFEKNPIDFLEAKGYKEVKKDLIIKLPKYSLFELENGRKRMLASAGELQKGNELALPSKYVNFLYLASHYEKLKGSPEDNEQKQLFVEQHKHYLDEIIEQISEFSKRVILADANLDKVLSAYNKHRDKPIREQAENIIHLFTLTNLGAPAAFKYFDTTIDRKRYTSTKEVLDATLIHQSITGLYETRIDLSQLGGDGGEAAAKGGGGSEAAAKGGTLNIEDEYRLHEISTEPDVSPGSTWLSDFPQAWAETGGMGLAVRQAPLIIPLKATSTPVSIKQYPMSQEAKLGIKPHIQRLLDQGILVPCQSPWNTPLLPVKKPGTNDYRPVQGLREVNKRVEDIHPTVPNPYNLLSGLPTSHRWYTVLDLKDAFFCLRLHPTSQPLFASEWRDPGMGISGQLTWTRLPQGFKNSPTLFNEALHRGLADFRIQHPDLILLQYVDDLLLAATSELDCQQGTRALLKTLGNLGYRASAKKAQICQKQVKYLGYLLREGQRWLTEARKETVMGQPTPKTPRQLREFLGKAGFCRLFIPRFAEMAAPLYPLTKPGTLFNWGPDQQKAYHEIKQALLTAPALGLPDLTKPFELFVDEKQGYAKGVLTQKLGPWRRPVAYLSKKLDPVAAGWPPCLRMVAAIAVLTKDAGKLTMGQPLVILAPHAVEALVKQPPDRWLSNARMTHYQAMLLDTDRVQFGPVVALNPATLLPLPEEGAPHDCLEILAETHGTEPDLTDQPIPDADHTWYTDGSSFLQEGQRKAGAAVTTETEVIWARALPAGTSAQRAELIALTQALKMAEGKRLNVYTDSRYAFATAHIHGEIYKRRGWLTSEGREIKNKSEILALLKALFLPKRLSIIHCLGHQKGDSAEARGNRLADQAAREAAIKTPPDTSTLLAGKRTADGSEFEKRTADGSEFESPKKKAKVE

SEQ ID NO: 7687 - protein, 2098 aa, synthetic construct
MPAAKRVKLDGGDKKYSIGLDIGTNSVGWAVITDEYKVPSKKFKVLGNTDRHSIKKNLIGALLFDSGETAEATRLKRTARRRYTRRKNRICYLQEIFSNEMAKVDDSFFHRLEESFLVEEDKKHERHPIFGNIVDEVAYHEKYPTIYHLRKKLVDSTDKADLRLIYLALAHMIKFRGHFLIEGDLNPDNSDVDKLFIQLVQTYNQLFEENPINASGVDAKAILSARLSKSRRLENLIAQLPGEKKNGLFGNLIALSLGLTPNFKSNFDLAEDAKLQLSKDTYDDDLDNLLAQIGDQYADLFLAAKNLSDAILLSDILRVNTEITKAPLSASMIKRYDEHHQDLTLLKALVRQQLPEKYKEIFFDQSKNGYAGYIDGGASQEEFYKFIKPILEKMDGTEELLVKLNREDLLRKQRTFDNGSIPHQIHLGELHAILRRQEDFYPFLKDNREKIEKILTFRIPYYVGPLARGNSRFAWMTRKSEETITPWNFEEVVDKGASAQSFIERMTNFDKNLPNEKVLPKHSLLYEYFTVYNELTKVKYVTEGMRKPAFLSGEQKKAIVDLLFKTNRKVTVKQLKEDYFKKIECFDSVEISGVEDRFNASLGTYHDLLKIIKDKDFLDNEENEDILEDIVLTLTLFEDREMIEERLKTYAHLFDDKVMKQLKRRRYTGWGRLSRKLINGIRDKQSGKTILDFLKSDGFANRNFMQLIHDDSLTFKEDIQKAQVSGQGDSLHEHIANLAGSPAIKKGILQTVKVVDELVKVMGRHKPENIVIEMARENQTTQKGQKNSRERMKRIEEGIKELGSQILKEHPVENTQLQNEKLYLYYLQNGRDMYVDQELDINRLSDYDVDHIVPQSFLKDDSIDNKVLTRSDKARGKSDNVPSEEVVKKMKNYWRQLLNAKLITQRKFDNLTKAERGGLSELDKAGFIKRQLVETRQITKHVAQILDSRMNTKYDENDKLIREVKVITLKSKLVSDFRKDFQFYKVREINNYHHAHDAYLNAVVGTALIKKYPKLESEFVYGDYKVYDVRKMIAKSEQEIGKATAKYFFYSNIMNFFKTEITLANGEIRKRPLIETNGETGEIVWDKGRDFATVRKVLSMPQVNIVKKTEVQTGGFSKESILPKRNSDKLIARKKDWDPKKYGGFDSPTVAYSVLVVAKVEKGKSKKLKSVKELLGITIMERSSFEKNPIDFLEAKGYKEVKKDLIIKLPKYSLFELENGRKRMLASAGELQKGNELALPSKYVNFLYLASHYEKLKGSPEDNEQKQLFVEQHKHYLDEIIEQISEFSKRVILADANLDKVLSAYNKHRDKPIREQAENIIHLFTLTNLGAPAAFKYFDTTIDRKRYTSTKEVLDATLIHQSITGLYETRIDLSQLGGDGGEAAAKGGGGSEAAAKGGVLNLEEEYRLHEKPVPSSIDPSWLQLFPTVWAERAGMGLANQVPPVVVELRSGASPVAVRQYPMSKEAREGIRPHIQRFLDLGVLVPCQSPWNTPLLPVKKPGTNDYRPVQDLREINKRVQDIHPTVPNPYNLLSSLPPSHTWYSVLDLKDAFFCLKLHPNSQPLFAFEWRDPEKGNTGQLTWTRLPQGFKNSPTLFNEALHRDLAPFRALNPQVVLLQYVDDLLVAAPTYRDCKEGTQKLLQELSKLGYRVSAKKAQLCQKEVTYLGYLLKEGKRWLTPARKATVMKIPPPTTPRQVREFLGTAGFCRLWIPGFASLAAPLYPLTKPSIPFIWTEEHQKAFDRIKEALLSAPALALPDLTKPFTLYVDERAGVARGVLTQTLGPWRRPVAYLSKKLDPVASGWPTCLKAVAAVALLLKDADKLTLGQNVTVIASHSLESIVRQPPDRWMTNARMTHYQSLLLNERVSFAPPAVLNPATLLPVESEATPVHRCSEILAEETGTRRDLKDQPLPGVPAWYTDGSSFIAEGKRRAGAAIVDGKRTVWASSLPEGTSAQKAELVALTQALRLAEGKDINIYTDSRYAFATAHIHGAIYKQRGWLTSAGKDIKNKEEILALLEAIHLPKRVAIIHCPGHQKGNDPVATGNRRADEAAKQAALSTRVLAETTKPAGKRTADGSEFEKRTADGSEFESPKKKAKVE

SEQ ID NO: 7688 - protein, 2100 aa, synthetic construct
MPAAKRVKLDGGDKKYSIGLDIGTNSVGWAVITDEYKVPSKKFKVLGNTDRHSIKKNLIGALLFDSGETAEATRLKRTARRRYTRRKNRICYLQEIFSNEMAKVDDSFFHRLEESFLVEEDKKHERHPIFGNIVDEVAYHEKYPTIYHLRKKLVDSTDKADLRLIYLALAHMIKFRGHFLIEGDLNPDNSDVDKLFIQLVQTYNQLFEENPINASGVDAKAILSARLSKSRRLENLIAQLPGEKKNGLFGNLIALSLGLTPNFKSNFDLAEDAKLQLSKDTYDDDLDNLLAQIGDQYADLFLAAKNLSDAILLSDILRVNTEITKAPLSASMIKRYDEHHQDLTLLKALVRQQLPEKYKEIFFDQSKNGYAGYIDGGASQEEFYKFIKPILEKMDGTEELLVKLNREDLLRKQRTFDNGSIPHQIHLGELHAILRRQEDFYPFLKDNREKIEKILTFRIPYYVGPLARGNSRFAWMTRKSEETITPWNFEEVVDKGASAQSFIERMTNFDKNLPNEKVLPKHSLLYEYFTVYNELTKVKYVTEGMRKPAFLSGEQKKAIVDLLFKTNRKVTVKQLKEDYFKKIECFDSVEISGVEDRFNASLGTYHDLLKIIKDKDFLDNEENEDILEDIVLTLTLFEDREMIEERLKTYAHLFDDKVMKQLKRRRYTGWGRLSRKLINGIRDKQSGKTILDFLKSDGFANRNFMQLIHDDSLTFKEDIQKAQVSGQGDSLHEHIANLAGSPAIKKGILQTVKVVDELVKVMGRHKPENIVIEMARENQTTQKGQKNSRERMKRIEEGIKELGSQILKEHPVENTQLQNEKLYLYYLQNGRDMYVDQELDINRLSDYDVDHIVPQSFLKDDSIDNKVLTRSDKARGKSDNVPSEEVVKKMKNYWRQLLNAKLITQRKFDNLTKAERGGLSELDKAGFIKRQLVETRQITKHVAQILDSRMNTKYDENDKLIREVKVITLKSKLVSDFRKDFQFYKVREINNYHHAHDAYLNAVVGTALIKKYPKLESEFVYGDYKVYDVRKMIAKSEQEIGKATAKYFFYSNIMNFFKTEITLANGEIRKRPLIETNGETGEIVWDKGRDFATVRKVLSMPQVNIVKKTEVQTGGFSKESILPKRNSDKLIARKKDWDPKKYGGFDSPTVAYSVLVVAKVEKGKSKKLKSVKELLGITIMERSSFEKNPIDFLEAKGYKEVKKDLIIKLPKYSLFELENGRKRMLASAGELQKGNELALPSKYVNFLYLASHYEKLKGSPEDNEQKQLFVEQHKHYLDEIIEQISEFSKRVILADANLDKVLSAYNKHRDKPIREQAENIIHLFTLTNLGAPAAFKYFDTTIDRKRYTSTKEVLDATLIHQSITGLYETRIDLSQLGGDGGEAAAKGGGGSEAAAKGGTLNIEDEYRLHETSKEPDVPLGSTWLSDFPQAWAETGGMGLAVRQAPLIIPLKATSTPVSIKQYPMSQEARLGIKPHIQRLLDQGILVPCQSPWNTPLLPVKKPGTNDYRPVQDLREVNKRVEDIHPTVPNPYNLLSGLPPSHQWYTVLDLKDAFFCLRLHPTSQPLFAFEWRDPEMGISGQLTWTRLPQGFKNSPTLFDEALHRDLADFRIQHPDLILLQYVDDLLLAATSEQDCQRGTRALLQTLGNLGYRASAKKAQICQKQVKYLGYLLKEGQRWLTEARKETVMGQPTPKTPRQLREFLGTAGFCRLWIPGFAEMAAPLYPLTKTGTLFNWGPDQQKAYQEIKQALLTAPALGLPDLTKPFELFVDEKQGYAKGVLTQKLGPWRRPVAYLSKKLDPVAAGWPPCLRMVAAIAVLTKDAGKLTMGQPLVILAPHAVEALVKQPPDRWLSNARMTHYQAMLLDTDRVQFGPVVALNPATLLPLPEKEAPHDCLEILAETHGTRPDLTDQPIPDADYTWYTDGSSFLQEGQRRAGAAVTTETEVIWARALPAGTSAQRAELIALTQALKMAEGKKLNVYTDSRYAFATAHVHGEIYRRRGLLTSEGREIKNKNEILALLKALFLPKRLSIIHCPGHQKGNSAEARGNRMADQAAREAAMKAVLETSTLLAGKRTADGSEFEKRTADGSEFESPKKKAKVE

SEQ ID NO: 7689 - protein, 2103 aa, synthetic construct
MPAAKRVKLDGGDKKYSIGLDIGTNSVGWAVITDEYKVPSKKFKVLGNTDRHSIKKNLIGALLFDSGETAEATRLKRTARRRYTRRKNRICYLQEIFSNEMAKVDDSFFHRLEESFLVEEDKKHERHPIFGNIVDEVAYHEKYPTIYHLRKKLVDSTDKADLRLIYLALAHMIKFRGHFLIEGDLNPDNSDVDKLFIQLVQTYNQLFEENPINASGVDAKAILSARLSKSRRLENLIAQLPGEKKNGLFGNLIALSLGLTPNFKSNFDLAEDAKLQLSKDTYDDDLDNLLAQIGDQYADLFLAAKNLSDAILLSDILRVNTEITKAPLSASMIKRYDEHHQDLTLLKALVRQQLPEKYKEIFFDQSKNGYAGYIDGGASQEEFYKFIKPILEKMDGTEELLVKLNREDLLRKQRTFDNGSIPHQIHLGELHAILRRQEDFYPFLKDNREKIEKILTFRIPYYVGPLARGNSRFAWMTRKSEETITPWNFEEVVDKGASAQSFIERMTNFDKNLPNEKVLPKHSLLYEYFTVYNELTKVKYVTEGMRKPAFLSGEQKKAIVDLLFKTNRKVTVKQLKEDYFKKIECFDSVEISGVEDRFNASLGTYHDLLKIIKDKDFLDNEENEDILEDIVLTLTLFEDREMIEERLKTYAHLFDDKVMKQLKRRRYTGWGRLSRKLINGIRDKQSGKTILDFLKSDGFANRNFMQLIHDDSLTFKEDIQKAQVSGQGDSLHEHIANLAGSPAIKKGILQTVKVVDELVKVMGRHKPENIVIEMARENQTTQKGQKNSRERMKRIEEGIKELGSQILKEHPVENTQLQNEKLYLYYLQNGRDMYVDQELDINRLSDYDVDHIVPQSFLKDDSIDNKVLTRSDKARGKSDNVPSEEVVKKMKNYWRQLLNAKLITQRKFDNLTKAERGGLSELDKAGFIKRQLVETRQITKHVAQILDSRMNTKYDENDKLIREVKVITLKSKLVSDFRKDFQFYKVREINNYHHAHDAYLNAVVGTALIKKYPKLESEFVYGDYKVYDVRKMIAKSEQEIGKATAKYFFYSNIMNFFKTEITLANGEIRKRPLIETNGETGEIVWDKGRDFATVRKVLSMPQVNIVKKTEVQTGGFSKESILPKRNSDKLIARKKDWDPKKYGGFDSPTVAYSVLVVAKVEKGKSKKLKSVKELLGITIMERSSFEKNPIDFLEAKGYKEVKKDLIIKLPKYSLFELENGRKRMLASAGELQKGNELALPSKYVNFLYLASHYEKLKGSPEDNEQKQLFVEQHKHYLDEIIEQISEFSKRVILADANLDKVLSAYNKHRDKPIREQAENIIHLFTLTNLGAPAAFKYFDTTIDRKRYTSTKEVLDATLIHQSITGLYETRIDLSQLGGDGGSGSETPGTSESATPESGGTAPLEEEYRLFLEAPIQNVTLLEQWKREIPKVWAEINPPGLASTQAPIHVQLLSTALPVRVRQYPITLEAKRSLRETIRKFRAAGILRPVHSPWNTPLLPVRKSGTSEYRMVQDLREVNKRVETIHPTVPNPYTLLSLLPPDRIWYSVLDLKDAFFCIPLAPESQLIFAFEWADAEEGESGQLTWTRLPQGFKNSPTLFNEALNRDLQGFRLDHPSVSLLQYVDDLLIAADTQAACLSATRDLLMTLAELGYRVSGKKAQLCQEEVTYLGFKIHKGSRSLSNSRTQAILQIPVPKTKRQVREFLGTIGYCRLWIPGFAELAQPLYAATRPGNDPLVWGEKEEEAFQSLKLALTQPPALALPSLDKPFQLFVEETSGAAKGVLTQALGPWKRPVAYLSKRLDPVAAGWPRCLRAIAAAALLTREASKLTFGQDIEITSSHNLESLLRSPPDKWLTNARITQYQVLLLDPPRVRFKQTAALNPATLLPETDDTLPIHHCLDTLDSLTSTRPDLTDQPLAQAEATLFTDGSSYIRDGKRYAGAAVVTLDSVIWAEPLPIGTSAQKAELIALTKALEWSKDKSVNIYTDSRYAFATLHVHGMIYRERGWLTAGGKAIKNAPEILALLTAVWLPKRVAVMHCKGHQKDDAPTSTGNRRADEVAREVAIRPLSTQATISAGKRTADGSEFEKRTADGSEFESPKKKAKVE

SEQ ID NO: 7690 - protein, 2178 aa, synthetic construct
MPAAKRVKLDGGDKKYSIGLDIGTNSVGWAVITDEYKVPSKKFKVLGNTDRHSIKKNLIGALLFDSGETAEATRLKRTARRRYTRRKNRICYLQEIFSNEMAKVDDSFFHRLEESFLVEEDKKHERHPIFGNIVDEVAYHEKYPTIYHLRKKLVDSTDKADLRLIYLALAHMIKFRGHFLIEGDLNPDNSDVDKLFIQLVQTYNQLFEENPINASGVDAKAILSARLSKSRRLENLIAQLPGEKKNGLFGNLIALSLGLTPNFKSNFDLAEDAKLQLSKDTYDDDLDNLLAQIGDQYADLFLAAKNLSDAILLSDILRVNTEITKAPLSASMIKRYDEHHQDLTLLKALVRQQLPEKYKEIFFDQSKNGYAGYIDGGASQEEFYKFIKPILEKMDGTEELLVKLNREDLLRKQRTFDNGSIPHQIHLGELHAILRRQEDFYPFLKDNREKIEKILTFRIPYYVGPLARGNSRFAWMTRKSEETITPWNFEEVVDKGASAQSFIERMTNFDKNLPNEKVLPKHSLLYEYFTVYNELTKVKYVTEGMRKPAFLSGEQKKAIVDLLFKTNRKVTVKQLKEDYFKKIECFDSVEISGVEDRFNASLGTYHDLLKIIKDKDFLDNEENEDILEDIVLTLTLFEDREMIEERLKTYAHLFDDKVMKQLKRRRYTGWGRLSRKLINGIRDKQSGKTILDFLKSDGFANRNFMQLIHDDSLTFKEDIQKAQVSGQGDSLHEHIANLAGSPAIKKGILQTVKVVDELVKVMGRHKPENIVIEMARENQTTQKGQKNSRERMKRIEEGIKELGSQILKEHPVENTQLQNEKLYLYYLQNGRDMYVDQELDINRLSDYDVDHIVPQSFLKDDSIDNKVLTRSDKARGKSDNVPSEEVVKKMKNYWRQLLNAKLITQRKFDNLTKAERGGLSELDKAGFIKRQLVETRQITKHVAQILDSRMNTKYDENDKLIREVKVITLKSKLVSDFRKDFQFYKVREINNYHHAHDAYLNAVVGTALIKKYPKLESEFVYGDYKVYDVRKMIAKSEQEIGKATAKYFFYSNIMNFFKTEITLANGEIRKRPLIETNGETGEIVWDKGRDFATVRKVLSMPQVNIVKKTEVQTGGFSKESILPKRNSDKLIARKKDWDPKKYGGFDSPTVAYSVLVVAKVEKGKSKKLKSVKELLGITIMERSSFEKNPIDFLEAKGYKEVKKDLIIKLPKYSLFELENGRKRMLASAGELQKGNELALPSKYVNFLYLASHYEKLKGSPEDNEQKQLFVEQHKHYLDEIIEQISEFSKRVILADANLDKVLSAYNKHRDKPIREQAENIIHLFTLTNLGAPAAFKYFDTTIDRKRYTSTKEVLDATLIHQSITGLYETRIDLSQLGGDGGSGSETPGTSESATPESGGMDLLKPLTVERKGVKIKGYWNSQADITCVPKDLLQGEEPVRQQNVTTIHGTQEGDVYYVNLKIDGRRINTEVIGTTLDYAIITPGDVPWILKKPLELTIKLDLEEQQGTLLNNSILSKKGKEELKQLFEKYSALWQSWENQVGHRRIRPHKIATGTVKPTPQKQYHINPKAKPDIQIVINDLLKQGVLIQKESTMNTPVYPVPKPNGRWRMVLDYRAVNKVTPLIAVQNQHSYGILGSLFKGRYKTTIDLSNGFWAHPIVPEDYWITAFTWQGKQYCWTVLPQGFLNSPGLFTGDVVDLLQGIPNVEVYVDDVYISHDSEKEHLEYLDILFNRLKEAGYIISLKKSNIANSIVDFLGFQITNEGRGLTDTFKEKLENITAPTTLKQLQSILGLLNFARNFIPDFTELIAPLYALIPKSTKNYVPWQIEHSTTLETLITKLNGAEYLQGRKGDKTLIMKVNASYTTGYIRYYNEGEKKPISYVSIVFSKTELKFTELEKLLTTVHKGLLKALDLSMGQNIHVYSPIVSMQNIQKTPQTAKKALASRWLSWLSYLEDPRIRFFYDPQMPALKDLPAVDTGKDNKKHPSNFQHIFYTDGSAITSPTKEGHLNAGMGIVYFINKDGNLQKQQEWSISLGNHTAQFAEIAAFEFALKKCLPLGGNILVVTDSNYVAKAYNEELDVWASNGFVNNRKKPLKHISKWKSVADLKRLRPDVVVTHEPGHQKLDSSPHAYGNNLADQLATQASFKVHAGKRTADGSEFEKRTADGSEFESPKKKAKVE

SEQ ID NO: 7691 - protein, 2100 aa, synthetic construct
MPAAKRVKLDGGDKKYSIGLDIGTNSVGWAVITDEYKVPSKKFKVLGNTDRHSIKKNLIGALLFDSGETAEATRLKRTARRRYTRRKNRICYLQEIFSNEMAKVDDSFFHRLEESFLVEEDKKHERHPIFGNIVDEVAYHEKYPTIYHLRKKLVDSTDKADLRLIYLALAHMIKFRGHFLIEGDLNPDNSDVDKLFIQLVQTYNQLFEENPINASGVDAKAILSARLSKSRRLENLIAQLPGEKKNGLFGNLIALSLGLTPNFKSNFDLAEDAKLQLSKDTYDDDLDNLLAQIGDQYADLFLAAKNLSDAILLSDILRVNTEITKAPLSASMIKRYDEHHQDLTLLKALVRQQLPEKYKEIFFDQSKNGYAGYIDGGASQEEFYKFIKPILEKMDGTEELLVKLNREDLLRKQRTFDNGSIPHQIHLGELHAILRRQEDFYPFLKDNREKIEKILTFRIPYYVGPLARGNSRFAWMTRKSEETITPWNFEEVVDKGASAQSFIERMTNFDKNLPNEKVLPKHSLLYEYFTVYNELTKVKYVTEGMRKPAFLSGEQKKAIVDLLFKTNRKVTVKQLKEDYFKKIECFDSVEISGVEDRFNASLGTYHDLLKIIKDKDFLDNEENEDILEDIVLTLTLFEDREMIEERLKTYAHLFDDKVMKQLKRRRYTGWGRLSRKLINGIRDKQSGKTILDFLKSDGFANRNFMQLIHDDSLTFKEDIQKAQVSGQGDSLHEHIANLAGSPAIKKGILQTVKVVDELVKVMGRHKPENIVIEMARENQTTQKGQKNSRERMKRIEEGIKELGSQILKEHPVENTQLQNEKLYLYYLQNGRDMYVDQELDINRLSDYDVDHIVPQSFLKDDSIDNKVLTRSDKARGKSDNVPSEEVVKKMKNYWRQLLNAKLITQRKFDNLTKAERGGLSELDKAGFIKRQLVETRQITKHVAQILDSRMNTKYDENDKLIREVKVITLKSKLVSDFRKDFQFYKVREINNYHHAHDAYLNAVVGTALIKKYPKLESEFVYGDYKVYDVRKMIAKSEQEIGKATAKYFFYSNIMNFFKTEITLANGEIRKRPLIETNGETGEIVWDKGRDFATVRKVLSMPQVNIVKKTEVQTGGFSKESILPKRNSDKLIARKKDWDPKKYGGFDSPTVAYSVLVVAKVEKGKSKKLKSVKELLGITIMERSSFEKNPIDFLEAKGYKEVKKDLIIKLPKYSLFELENGRKRMLASAGELQKGNELALPSKYVNFLYLASHYEKLKGSPEDNEQKQLFVEQHKHYLDEIIEQISEFSKRVILADANLDKVLSAYNKHRDKPIREQAENIIHLFTLTNLGAPAAFKYFDTTIDRKRYTSTKEVLDATLIHQSITGLYETRIDLSQLGGDGGSGSETPGTSESATPESGGTLQLEEEYRLFEPESTQKQEMDIWLKNFPQAWAETGGMGTAHCQAPVLIQLKATATPISIRQYPMPHEAYQGIKPHIRRMLDQGILKPCQSPWNTPLLPVKKPGTEDYRPVQDLREVNKRVEDIHPTVPNPYNLLSTLPPSHPWYTVLDLKDAFFCLRLHSESQLLFAFEWRDPEIGLSGQLTWTRLPQGFKNSPTLFNEALHSDLADFRVRYPALVLLQYVDDLLLAAATRTECLEGTKALLETLGNKGYRASAKKAQICLQEVTYLGYSLKDGQRWLTKARKEAILSIPVPKNSRQVREFLGTAGYCRLWIPGFAELAAPLYPLTRPGTLFQWGTEQQLAFEDIKKALLSSPALGLPDITKPFELFIDENSGFAKGVLVQKLGPWKRPVAYLSKKLDTVASGWPPCLRMVAAIAILVKDAGKLTLGQPLTILTSHPVEALVRQPPNKWLSNARMTHYQAMLLDAERVHFGPTVSLNPATLLPLPSGGNHHDCLQILAETHGTRPDLTDQPLPDADLTWYTDGSSFIRNGEREAGAAVTTESEVIWAAPLPPGTSAQRAELIALTQALKMAEGKKLTVYTDSRYAFATTHVHGEIYRRRGWLTSEGKEIKNKNEILALLEALFLPKRLSIIHCPGHQKGDSPQAKGNRLADDTAKKAATETHSSLTVLPAGKRTADGSEFEKRTADGSEFESPKKKAKVE

SEQ ID NO: 7692 - protein, 2011 aa, synthetic construct
MPAAKRVKLDGGDKKYSIGLDIGTNSVGWAVITDEYKVPSKKFKVLGNTDRHSIKKNLIGALLFDSGETAEATRLKRTARRRYTRRKNRICYLQEIFSNEMAKVDDSFFHRLEESFLVEEDKKHERHPIFGNIVDEVAYHEKYPTIYHLRKKLVDSTDKADLRLIYLALAHMIKFRGHFLIEGDLNPDNSDVDKLFIQLVQTYNQLFEENPINASGVDAKAILSARLSKSRRLENLIAQLPGEKKNGLFGNLIALSLGLTPNFKSNFDLAEDAKLQLSKDTYDDDLDNLLAQIGDQYADLFLAAKNLSDAILLSDILRVNTEITKAPLSASMIKRYDEHHQDLTLLKALVRQQLPEKYKEIFFDQSKNGYAGYIDGGASQEEFYKFIKPILEKMDGTEELLVKLNREDLLRKQRTFDNGSIPHQIHLGELHAILRRQEDFYPFLKDNREKIEKILTFRIPYYVGPLARGNSRFAWMTRKSEETITPWNFEEVVDKGASAQSFIERMTNFDKNLPNEKVLPKHSLLYEYFTVYNELTKVKYVTEGMRKPAFLSGEQKKAIVDLLFKTNRKVTVKQLKEDYFKKIECFDSVEISGVEDRFNASLGTYHDLLKIIKDKDFLDNEENEDILEDIVLTLTLFEDREMIEERLKTYAHLFDDKVMKQLKRRRYTGWGRLSRKLINGIRDKQSGKTILDFLKSDGFANRNFMQLIHDDSLTFKEDIQKAQVSGQGDSLHEHIANLAGSPAIKKGILQTVKVVDELVKVMGRHKPENIVIEMARENQTTQKGQKNSRERMKRIEEGIKELGSQILKEHPVENTQLQNEKLYLYYLQNGRDMYVDQELDINRLSDYDVDHIVPQSFLKDDSIDNKVLTRSDKARGKSDNVPSEEVVKKMKNYWRQLLNAKLITQRKFDNLTKAERGGLSELDKAGFIKRQLVETRQITKHVAQILDSRMNTKYDENDKLIREVKVITLKSKLVSDFRKDFQFYKVREINNYHHAHDAYLNAVVGTALIKKYPKLESEFVYGDYKVYDVRKMIAKSEQEIGKATAKYFFYSNIMNFFKTEITLANGEIRKRPLIETNGETGEIVWDKGRDFATVRKVLSMPQVNIVKKTEVQTGGFSKESILPKRNSDKLIARKKDWDPKKYGGFDSPTVAYSVLVVAKVEKGKSKKLKSVKELLGITIMERSSFEKNPIDFLEAKGYKEVKKDLIIKLPKYSLFELENGRKRMLASAGELQKGNELALPSKYVNFLYLASHYEKLKGSPEDNEQKQLFVEQHKHYLDEIIEQISEFSKRVILADANLDKVLSAYNKHRDKPIREQAENIIHLFTLTNLGAPAAFKYFDTTIDRKRYTSTKEVLDATLIHQSITGLYETRIDLSQLGGDGGSGSETPGTSESATPESGGPLGTSDSPVTHADPIDWKSEEPVWVDQWPLTQEKLSAAQQLVQEQLRLGHIEPSTSAWNSPIFVIKKKSGKWRLLQDLRKVNETMMHMGALQPGLPTPSPIPDKSYIIVIDLKDCFYTIPLAPQDCKRFAFSLPSVNFKEPMQRYQWRVLPQGMTNSPTLCQKFVATAIAPVRQRFPQLYLVHYMDDILLAHTDEHLLYQAFSILKQHLSLNGLVIADEKIQTHFPYNYLGFSLYPRVYNTQLVKLQTDHLKTLNDFQKLLGDINWIRPYLKLPTYTLQPLFDILKGDSDPASPRTLSLEGRTALQSIEEAIRQQQITYCDYQRSWGLYILPTPRAPTGVLYQDKPLRWIYLSATPTKHLLPYYELVAKIIAKGRHEAIQYFGMEPPFICVPYALEQQDWLFQFSDNWSIAFANYPGQITHHYPSDKLLQFASSHAFIFPKIVRRQPIPEATLIFTDGSSNGTAALIINHQTYYAQTSFSSAQVVELFAVHQALLTVPTSFNLFTDSSYVVGALQMIETVPIIGTTSPEVLNLFTLIQQVLHCRQHPCFFGHIRAHSTLPGALVQGNHTADVLTKQVFFQSAGKRTADGSEFEKRTADGSEFESPKKKAKVE

SEQ ID NO: 7693 - protein, 2223 aa, synthetic construct
MPAAKRVKLDGGDKKYSIGLDIGTNSVGWAVITDEYKVPSKKFKVLGNTDRHSIKKNLIGALLFDSGETAEATRLKRTARRRYTRRKNRICYLQEIFSNEMAKVDDSFFHRLEESFLVEEDKKHERHPIFGNIVDEVAYHEKYPTIYHLRKKLVDSTDKADLRLIYLALAHMIKFRGHFLIEGDLNPDNSDVDKLFIQLVQTYNQLFEENPINASGVDAKAILSARLSKSRRLENLIAQLPGEKKNGLFGNLIALSLGLTPNFKSNFDLAEDAKLQLSKDTYDDDLDNLLAQIGDQYADLFLAAKNLSDAILLSDILRVNTEITKAPLSASMIKRYDEHHQDLTLLKALVRQQLPEKYKEIFFDQSKNGYAGYIDGGASQEEFYKFIKPILEKMDGTEELLVKLNREDLLRKQRTFDNGSIPHQIHLGELHAILRRQEDFYPFLKDNREKIEKILTFRIPYYVGPLARGNSRFAWMTRKSEETITPWNFEEVVDKGASAQSFIERMTNFDKNLPNEKVLPKHSLLYEYFTVYNELTKVKYVTEGMRKPAFLSGEQKKAIVDLLFKTNRKVTVKQLKEDYFKKIECFDSVEISGVEDRFNASLGTYHDLLKIIKDKDFLDNEENEDILEDIVLTLTLFEDREMIEERLKTYAHLFDDKVMKQLKRRRYTGWGRLSRKLINGIRDKQSGKTILDFLKSDGFANRNFMQLIHDDSLTFKEDIQKAQVSGQGDSLHEHIANLAGSPAIKKGILQTVKVVDELVKVMGRHKPENIVIEMARENQTTQKGQKNSRERMKRIEEGIKELGSQILKEHPVENTQLQNEKLYLYYLQNGRDMYVDQELDINRLSDYDVDHIVPQSFLKDDSIDNKVLTRSDKARGKSDNVPSEEVVKKMKNYWRQLLNAKLITQRKFDNLTKAERGGLSELDKAGFIKRQLVETRQITKHVAQILDSRMNTKYDENDKLIREVKVITLKSKLVSDFRKDFQFYKVREINNYHHAHDAYLNAVVGTALIKKYPKLESEFVYGDYKVYDVRKMIAKSEQEIGKATAKYFFYSNIMNFFKTEITLANGEIRKRPLIETNGETGEIVWDKGRDFATVRKVLSMPQVNIVKKTEVQTGGFSKESILPKRNSDKLIARKKDWDPKKYGGFDSPTVAYSVLVVAKVEKGKSKKLKSVKELLGITIMERSSFEKNPIDFLEAKGYKEVKKDLIIKLPKYSLFELENGRKRMLASAGELQKGNELALPSKYVNFLYLASHYEKLKGSPEDNEQKQLFVEQHKHYLDEIIEQISEFSKRVILADANLDKVLSAYNKHRDKPIREQAENIIHLFTLTNLGAPAAFKYFDTTIDRKRYTSTKEVLDATLIHQSITGLYETRIDLSQLGGDGGSGSETPGTSESATPESGGTLGDQGSRGSDPLPEPRVTLTVEGIPTEFLVNTGAEHSVLTKPMGKMGSKRTVVAGATGSKVYPWTTKRLLKIGQKQVTHSFLVIPECPAPLLGRDLLTKLKAQIQFSTEGPQVTWEDRPAMCLVLNLEEEYRLHEKPVPPSIDPSWLQLFPMVWAEKAGMGLANQVPPVVVELKSDASPVAVRQYPMSKEAREGIRPHIQRFLDLGILVPCQSPWNTPLLPVKKPGTNDYRPVQDLREVNKRVQDIHPTVPNPYNLLSSLPPSHTWYSVLDLKDAFFCLKLHPNSQPLFAFEWRDPEKGNTGQLTWTRLPQGFKNSPTLFDEALHRDLASFRALNPQVVMLQYVDDLLVAAPTYRDCKEGTRRLLQELSKLGYRVSAKKAQLCREEVTYLGYLLKGGKRWLTPARKATVMKIPTPTTPRQVREFLGTAGFCRLWIPGFASLAAPLYPLTREKVPFTWTEAHQEAFGRIKEALLSAPALALPDLTKPFALYVDEKEGVARGVLTQTLGPWRRPVAYLSKKLDPVASGWPTCLKAIAAVALLLKDADKLTLGQNVLVIAPHNLESIVRQPPDRWMTNARMTHYQSLLLNERVSFAPPAILNPATLLPVESDDTPIHICSEILAEETGTRPDLRDQPLPGVPAWYTDGSSFIMDGRRQAGAAIVDNKRTVWASNLPEGTSAQKAELIALTQALRLAEGKSINIYTDSRYAFATAHVHGAIYKQRGLLTSAGKDIKNKEEILALLEAIHLPKRVAIIHCPGHQRGTDPVATGNRKADEAAKQAAQSTRILTETTKNAGKRTADGSEFEKRTADGSEFESPKKKAKVE

SEQ ID NO: 7694 - protein, 2132 aa, synthetic construct
MPAAKRVKLDGGDKKYSIGLDIGTNSVGWAVITDEYKVPSKKFKVLGNTDRHSIKKNLIGALLFDSGETAEATRLKRTARRRYTRRKNRICYLQEIFSNEMAKVDDSFFHRLEESFLVEEDKKHERHPIFGNIVDEVAYHEKYPTIYHLRKKLVDSTDKADLRLIYLALAHMIKFRGHFLIEGDLNPDNSDVDKLFIQLVQTYNQLFEENPINASGVDAKAILSARLSKSRRLENLIAQLPGEKKNGLFGNLIALSLGLTPNFKSNFDLAEDAKLQLSKDTYDDDLDNLLAQIGDQYADLFLAAKNLSDAILLSDILRVNTEITKAPLSASMIKRYDEHHQDLTLLKALVRQQLPEKYKEIFFDQSKNGYAGYIDGGASQEEFYKFIKPILEKMDGTEELLVKLNREDLLRKQRTFDNGSIPHQIHLGELHAILRRQEDFYPFLKDNREKIEKILTFRIPYYVGPLARGNSRFAWMTRKSEETITPWNFEEVVDKGASAQSFIERMTNFDKNLPNEKVLPKHSLLYEYFTVYNELTKVKYVTEGMRKPAFLSGEQKKAIVDLLFKTNRKVTVKQLKEDYFKKIECFDSVEISGVEDRFNASLGTYHDLLKIIKDKDFLDNEENEDILEDIVLTLTLFEDREMIEERLKTYAHLFDDKVMKQLKRRRYTGWGRLSRKLINGIRDKQSGKTILDFLKSDGFANRNFMQLIHDDSLTFKEDIQKAQVSGQGDSLHEHIANLAGSPAIKKGILQTVKVVDELVKVMGRHKPENIVIEMARENQTTQKGQKNSRERMKRIEEGIKELGSQILKEHPVENTQLQNEKLYLYYLQNGRDMYVDQELDINRLSDYDVDHIVPQSFLKDDSIDNKVLTRSDKARGKSDNVPSEEVVKKMKNYWRQLLNAKLITQRKFDNLTKAERGGLSELDKAGFIKRQLVETRQITKHVAQILDSRMNTKYDENDKLIREVKVITLKSKLVSDFRKDFQFYKVREINNYHHAHDAYLNAVVGTALIKKYPKLESEFVYGDYKVYDVRKMIAKSEQEIGKATAKYFFYSNIMNFFKTEITLANGEIRKRPLIETNGETGEIVWDKGRDFATVRKVLSMPQVNIVKKTEVQTGGFSKESILPKRNSDKLIARKKDWDPKKYGGFDSPTVAYSVLVVAKVEKGKSKKLKSVKELLGITIMERSSFEKNPIDFLEAKGYKEVKKDLIIKLPKYSLFELENGRKRMLASAGELQKGNELALPSKYVNFLYLASHYEKLKGSPEDNEQKQLFVEQHKHYLDEIIEQISEFSKRVILADANLDKVLSAYNKHRDKPIREQAENIIHLFTLTNLGAPAAFKYFDTTIDRKRYTSTKEVLDATLIHQSITGLYETRIDLSQLGGDGGSGSETPGTSESATPESGGLLGRDLLTKLKAQIQFSTEGPQVTWEDRPAMCLVLNLEEEYRLHEKPVPPSIDPSWLQLFPMVWAEKAGMGLANQVPPVVVELKSDASPVAVRQYPMSKEAREGIRPHIQRFLDLGILVPCQSPWNTPLLPVKKPGTNDYRPVQDLREVNKRVQDIHPTVPNPYNLLSSLPPSHTWYSVLDLKDAFFCLKLHPNSQPLFAFEWRDPEKGNTGQLTWTRLPQGFKNSPTLFNEALHRDLASFRALNPQVVMLQYVDDLLVAAPTYRDCKEGTRRLLQELSKLGYRVSAKKAQLCREEVTYLGYLLKGGKRWLTPARKATVMKIPTPTTPRQVREFLGKAGFCRLFIPGFASLAAPLYPLTRPKVPFTWTEAHQEAFGRIKEALLSAPALALPDLTKPFALYVDEKEGVARGVLTQTLGPWRRPVAYLSKKLDPVASGWPTCLKAIAAVALLLKDADKLTLGQNVLVIAPHNLESIVRQPPDRWMTNARMTHYQSLLLNERVSFAPPAILNPATLLPVESDDTPIHICSEILAEETGTRPDLRDQPLPGVPAWYTDGSSFIMDGRRQAGAAIVDNKRTVWASNLPEGTSAQKAELIALTQALRLAEGKSINIYTDSRYAFATAHVHGAIYKQRGWLTSAGKDIKNKEEILALLEAIHLPKRVAIIHCPGHQRGTDPVATGNRKADEAAKQAAQSTRILTETTKNAGKRTADGSEFEKRTADGSEFESPKKKAKVE

SEQ ID NO: 7695 - protein, 2223 aa, synthetic construct
MPAAKRVKLDGGDKKYSIGLDIGTNSVGWAVITDEYKVPSKKFKVLGNTDRHSIKKNLIGALLFDSGETAEATRLKRTARRRYTRRKNRICYLQEIFSNEMAKVDDSFFHRLEESFLVEEDKKHERHPIFGNIVDEVAYHEKYPTIYHLRKKLVDSTDKADLRLIYLALAHMIKFRGHFLIEGDLNPDNSDVDKLFIQLVQTYNQLFEENPINASGVDAKAILSARLSKSRRLENLIAQLPGEKKNGLFGNLIALSLGLTPNFKSNFDLAEDAKLQLSKDTYDDDLDNLLAQIGDQYADLFLAAKNLSDAILLSDILRVNTEITKAPLSASMIKRYDEHHQDLTLLKALVRQQLPEKYKEIFFDQSKNGYAGYIDGGASQEEFYKFIKPILEKMDGTEELLVKLNREDLLRKQRTFDNGSIPHQIHLGELHAILRRQEDFYPFLKDNREKIEKILTFRIPYYVGPLARGNSRFAWMTRKSEETITPWNFEEVVDKGASAQSFIERMTNFDKNLPNEKVLPKHSLLYEYFTVYNELTKVKYVTEGMRKPAFLSGEQKKAIVDLLFKTNRKVTVKQLKEDYFKKIECFDSVEISGVEDRFNASLGTYHDLLKIIKDKDFLDNEENEDILEDIVLTLTLFEDREMIEERLKTYAHLFDDKVMKQLKRRRYTGWGRLSRKLINGIRDKQSGKTILDFLKSDGFANRNFMQLIHDDSLTFKEDIQKAQVSGQGDSLHEHIANLAGSPAIKKGILQTVKVVDELVKVMGRHKPENIVIEMARENQTTQKGQKNSRERMKRIEEGIKELGSQILKEHPVENTQLQNEKLYLYYLQNGRDMYVDQELDINRLSDYDVDHIVPQSFLKDDSIDNKVLTRSDKARGKSDNVPSEEVVKKMKNYWRQLLNAKLITQRKFDNLTKAERGGLSELDKAGFIKRQLVETRQITKHVAQILDSRMNTKYDENDKLIREVKVITLKSKLVSDFRKDFQFYKVREINNYHHAHDAYLNAVVGTALIKKYPKLESEFVYGDYKVYDVRKMIAKSEQEIGKATAKYFFYSNIMNFFKTEITLANGEIRKRPLIETNGETGEIVWDKGRDFATVRKVLSMPQVNIVKKTEVQTGGFSKESILPKRNSDKLIARKKDWDPKKYGGFDSPTVAYSVLVVAKVEKGKSKKLKSVKELLGITIMERSSFEKNPIDFLEAKGYKEVKKDLIIKLPKYSLFELENGRKRMLASAGELQKGNELALPSKYVNFLYLASHYEKLKGSPEDNEQKQLFVEQHKHYLDEIIEQISEFSKRVILADANLDKVLSAYNKHRDKPIREQAENIIHLFTLTNLGAPAAFKYFDTTIDRKRYTSTKEVLDATLIHQSITGLYETRIDLSQLGGDGGSGSETPGTSESATPESGGTLGDQGSRGSDPLPEPRVTLTVEGIPTEFLVNTGAEHSVLTKPMGKMGSKRTVVAGATGSKVYPWTTKRLLKIGQKQVTHSFLVIPECPAPLLGRDLLTKLKAQIQFSTEGPQVTWEDRPAMCLVLNLEEEYRLHEKPVPPSIDPSWLQLFPMVWAEKAGMGLANQVPPVVVELKSDASPVAVRQYPMSKEAREGIRPHIQRFLDLGILVPCQSPWNTPLLPVKKPGTNDYRPVQDLREVNKRVQDIHPTVPNPYNLLSSLPPSHTWYSVLDLKDAFFCLKLHPNSQPLFAFEWRDPEKGNTGQLTWTRLPQGFKNSPTLFNEALHRDLASFRALNPQVVMLQYVDDLLVAAPTYRDCKEGTRRLLQELSKLGYRVSAKKAQLCREEVTYLGYLLKGGKRWLTPARKATVMKIPTPTTPRQVREFLGTAGFCRLWIPGFASLAAPLYPLTRPKVPFTWTEAHQEAFGRIKEALLSAPALALPDLTKPFALYVDEKEGVARGVLTQTLGPWRRPVAYLSKKLDPVASGWPTCLKAIAAVALLLKDADKLTLGQNVLVIAPHNLESIVRQPPDRWMTNARMTHYQSLLLNERVSFAPPAILNPATLLPVESDDTPIHICSEILAEETGTRPDLRDQPLPGVPAWYTDGSSFIMDGRRQAGAAIVDNKRTVWASNLPEGTSAQKAELIALTQALRLAEGKSINIYTDSRYAFATAHVHGAIYKQRGWLTSAGKDIKNKEEILALLEAIHLPKRVAIIHCPGHQRGTDPVATGNRKADEAAKQAAQSTRILTETTKNAGKRTADGSEFEKRTADGSEFESPKKKAKVE

SEQ ID NO: 7696 - protein, 2101 aa, synthetic construct
MPAAKRVKLDGGDKKYSIGLDIGTNSVGWAVITDEYKVPSKKFKVLGNTDRHSIKKNLIGALLFDSGETAEATRLKRTARRRYTRRKNRICYLQEIFSNEMAKVDDSFFHRLEESFLVEEDKKHERHPIFGNIVDEVAYHEKYPTIYHLRKKLVDSTDKADLRLIYLALAHMIKFRGHFLIEGDLNPDNSDVDKLFIQLVQTYNQLFEENPINASGVDAKAILSARLSKSRRLENLIAQLPGEKKNGLFGNLIALSLGLTPNFKSNFDLAEDAKLQLSKDTYDDDLDNLLAQIGDQYADLFLAAKNLSDAILLSDILRVNTEITKAPLSASMIKRYDEHHQDLTLLKALVRQQLPEKYKEIFFDQSKNGYAGYIDGGASQEEFYKFIKPILEKMDGTEELLVKLNREDLLRKQRTFDNGSIPHQIHLGELHAILRRQEDFYPFLKDNREKIEKILTFRIPYYVGPLARGNSRFAWMTRKSEETITPWNFEEVVDKGASAQSFIERMTNFDKNLPNEKVLPKHSLLYEYFTVYNELTKVKYVTEGMRKPAFLSGEQKKAIVDLLFKTNRKVTVKQLKEDYFKKIECFDSVEISGVEDRFNASLGTYHDLLKIIKDKDFLDNEENEDILEDIVLTLTLFEDREMIEERLKTYAHLFDDKVMKQLKRRRYTGWGRLSRKLINGIRDKQSGKTILDFLKSDGFANRNFMQLIHDDSLTFKEDIQKAQVSGQGDSLHEHIANLAGSPAIKKGILQTVKVVDELVKVMGRHKPENIVIEMARENQTTQKGQKNSRERMKRIEEGIKELGSQILKEHPVENTQLQNEKLYLYYLQNGRDMYVDQELDINRLSDYDVDHIVPQSFLKDDSIDNKVLTRSDKARGKSDNVPSEEVVKKMKNYWRQLLNAKLITQRKFDNLTKAERGGLSELDKAGFIKRQLVETRQITKHVAQILDSRMNTKYDENDKLIREVKVITLKSKLVSDFRKDFQFYKVREINNYHHAHDAYLNAVVGTALIKKYPKLESEFVYGDYKVYDVRKMIAKSEQEIGKATAKYFFYSNIMNFFKTEITLANGEIRKRPLIETNGETGEIVWDKGRDFATVRKVLSMPQVNIVKKTEVQTGGFSKESILPKRNSDKLIARKKDWDPKKYGGFDSPTVAYSVLVVAKVEKGKSKKLKSVKELLGITIMERSSFEKNPIDFLEAKGYKEVKKDLIIKLPKYSLFELENGRKRMLASAGELQKGNELALPSKYVNFLYLASHYEKLKGSPEDNEQKQLFVEQHKHYLDEIIEQISEFSKRVILADANLDKVLSAYNKHRDKPIREQAENIIHLFTLTNLGAPAAFKYFDTTIDRKRYTSTKEVLDATLIHQSITGLYETRIDLSQLGGDGGSGSETPGTSESATPESGGTLNLEDEYRLYETSAEPEVSPGSTWLSDFPQAWAETGGMGLAVRQAPLIIPLKATSTPVSIKQYPMSQEAKLGIKPHIQRLLDQGILVPCQSPWNTPLLPVKKPGTNDYRPVQDLREVNKRVEDIHPTVPNPYNLLSGLPPSHRWYTVLDLKDAFFCLRLHPTSQPLFAFEWRDPGMGISGQLTWTRLPQGFKNSPTLFNEALHRDLADFRIQHPDLILLQYVDDILLAATSELDCQQGTRALLLTLGNLGYRASAKKAQLCQKQVKYLGYLLKEGQRWLTEARKETVMGQPTPKTPRQLREFLGTAGFCRLWIPGFAEMAAPLYPLTKPGTLFNWGPDQQKAYQEIKQALLTAPALGLPDLTKPFELFVDEKQGYAKGVLTQKLGPWRRPVAYLSKKLDPVAAGWPPCLRMVAAIAVLRKDAGKLTMGQPLVILAPHAVEALVKQPPDRWLSNARMTHYQAMLLDTDRVQFGPVVALNPATLLPLPEEGAPHDCLEILAETHGTRPDLTDQPIPDADHTWYTDGSSFLQEGQRKAGAAVTTETEVIWARALPAGTSAQRAELIALTQALKMAEGKRLNVYTDSRYAFATAHIHGEIYRRRGWLTSEGREIKNKSEILALLKALFLPKRLSIIHCLGHQKGDSAEARGNRLADQAAREAAIKTPPDTSTLLAGKRTADGSEFEKRTADGSEFESPKKKAKVE

SEQ ID NO: 7697 - protein, 2101 aa, synthetic construct
MPAAKRVKLDGGDKKYSIGLDIGTNSVGWAVITDEYKVPSKKFKVLGNTDRHSIKKNLIGALLFDSGETAEATRLKRTARRRYTRRKNRICYLQEIFSNEMAKVDDSFFHRLEESFLVEEDKKHERHPIFGNIVDEVAYHEKYPTIYHLRKKLVDSTDKADLRLIYLALAHMIKFRGHFLIEGDLNPDNSDVDKLFIQLVQTYNQLFEENPINASGVDAKAILSARLSKSRRLENLIAQLPGEKKNGLFGNLIALSLGLTPNFKSNFDLAEDAKLQLSKDTYDDDLDNLLAQIGDQYADLFLAAKNLSDAILLSDILRVNTEITKAPLSASMIKRYDEHHQDLTLLKALVRQQLPEKYKEIFFDQSKNGYAGYIDGGASQEEFYKFIKPILEKMDGTEELLVKLNREDLLRKQRTFDNGSIPHQIHLGELHAILRRQEDFYPFLKDNREKIEKILTFRIPYYVGPLARGNSRFAWMTRKSEETITPWNFEEVVDKGASAQSFIERMTNFDKNLPNEKVLPKHSLLYEYFTVYNELTKVKYVTEGMRKPAFLSGEQKKAIVDLLFKTNRKVTVKQLKEDYFKKIECFDSVEISGVEDRFNASLGTYHDLLKIIKDKDFLDNEENEDILEDIVLTLTLFEDREMIEERLKTYAHLFDDKVMKQLKRRRYTGWGRLSRKLINGIRDKQSGKTILDFLKSDGFANRNFMQLIHDDSLTFKEDIQKAQVSGQGDSLHEHIANLAGSPAIKKGILQTVKVVDELVKVMGRHKPENIVIEMARENQTTQKGQKNSRERMKRIEEGIKELGSQILKEHPVENTQLQNEKLYLYYLQNGRDMYVDQELDINRLSDYDVDHIVPQSFLKDDSIDNKVLTRSDKARGKSDNVPSEEVVKKMKNYWRQLLNAKLITQRKFDNLTKAERGGLSELDKAGFIKRQLVETRQITKHVAQILDSRMNTKYDENDKLIREVKVITLKSKLVSDFRKDFQFYKVREINNYHHAHDAYLNAVVGTALIKKYPKLESEFVYGDYKVYDVRKMIAKSEQEIGKATAKYFFYSNIMNFFKTEITLANGEIRKRPLIETNGETGEIVWDKGRDFATVRKVLSMPQVNIVKKTEVQTGGFSKESILPKRNSDKLIARKKDWDPKKYGGFDSPTVAYSVLVVAKVEKGKSKKLKSVKELLGITIMERSSFEKNPIDFLEAKGYKEVKKDLIIKLPKYSLFELENGRKRMLASAGELQKGNELALPSKYVNFLYLASHYEKLKGSPEDNEQKQLFVEQHKHYLDEIIEQISEFSKRVILADANLDKVLSAYNKHRDKPIREQAENIIHLFTLTNLGAPAAFKYFDTTIDRKRYTSTKEVLDATLIHQSITGLYETRIDLSQLGGDGGSGSETPGTSESATPESGGTLNLEDEYRLYETSAEPEVSPGSTWLSDFPQAWAETGGMGLAVRQAPLIIPLKATSTPVSIKQYPMSQEAKLGIKPHIQRLLDQGILVPCQSPWNTPLLPVKKPGTNDYRPVQDLREVNKRVEDIHPTVPNPYNLLSGLPPSHRWYTVLDLKDAFFCLRLHPTSQPLFAFEWRDPGMGISGQLTWTRLPQGFKNSPTLFNEALHRDLADFRIQHPDLILLQYVDDILLAATSELDCQQGTRALLLTLGNLGYRASAKKAQLCQKQVKYLGYLLKEGQRWLTEARKETVMGQPTPKTPRQLREFLGKAGFCRLFIPGFAEMAAPLYPLTKPGTLFNWGPDQQKAYQEIKQALLTAPALGLPDLTKPFELFVDEKQGYAKGVLTQKLGPWRRPVAYLSKKLDPVAAGWPPCLRMVAAIAVLRKDAGKLTMGQPLVILAPHAVEALVKQPPDRWLSNARMTHYQAMLLDTDRVQFGPVVALNPATLLPLPEEGAPHDCLEILAETHGTRPDLTDQPIPDADHTWYTDGSSFLQEGQRKAGAAVTTETEVIWARALPAGTSAQRAELIALTQALKMAEGKRLNVYTDSRYAFATAHIHGEIYRRRGWLTSEGREIKNKSEILALLKALFLPKRLSIIHCLGHQKGDSAEARGNRLADQAAREAAIKTPPDTSTLLAGKRTADGSEFEKRTADGSEFESPKKKAKVE

SEQ ID NO: 7698 - protein, 2101 aa, synthetic construct
MPAAKRVKLDGGDKKYSIGLDIGTNSVGWAVITDEYKVPSKKFKVLGNTDRHSIKKNLIGALLFDSGETAEATRLKRTARRRYTRRKNRICYLQEIFSNEMAKVDDSFFHRLEESFLVEEDKKHERHPIFGNIVDEVAYHEKYPTIYHLRKKLVDSTDKADLRLIYLALAHMIKFRGHFLIEGDLNPDNSDVDKLFIQLVQTYNQLFEENPINASGVDAKAILSARLSKSRRLENLIAQLPGEKKNGLFGNLIALSLGLTPNFKSNFDLAEDAKLQLSKDTYDDDLDNLLAQIGDQYADLFLAAKNLSDAILLSDILRVNTEITKAPLSASMIKRYDEHHQDLTLLKALVRQQLPEKYKEIFFDQSKNGYAGYIDGGASQEEFYKFIKPILEKMDGTEELLVKLNREDLLRKQRTFDNGSIPHQIHLGELHAILRRQEDFYPFLKDNREKIEKILTFRIPYYVGPLARGNSRFAWMTRKSEETITPWNFEEVVDKGASAQSFIERMTNFDKNLPNEKVLPKHSLLYEYFTVYNELTKVKYVTEGMRKPAFLSGEQKKAIVDLLFKTNRKVTVKQLKEDYFKKIECFDSVEISGVEDRFNASLGTYHDLLKIIKDKDFLDNEENEDILEDIVLTLTLFEDREMIEERLKTYAHLFDDKVMKQLKRRRYTGWGRLSRKLINGIRDKQSGKTILDFLKSDGFANRNFMQLIHDDSLTFKEDIQKAQVSGQGDSLHEHIANLAGSPAIKKGILQTVKVVDELVKVMGRHKPENIVIEMARENQTTQKGQKNSRERMKRIEEGIKELGSQILKEHPVENTQLQNEKLYLYYLQNGRDMYVDQELDINRLSDYDVDHIVPQSFLKDDSIDNKVLTRSDKARGKSDNVPSEEVVKKMKNYWRQLLNAKLITQRKFDNLTKAERGGLSELDKAGFIKRQLVETRQITKHVAQILDSRMNTKYDENDKLIREVKVITLKSKLVSDFRKDFQFYKVREINNYHHAHDAYLNAVVGTALIKKYPKLESEFVYGDYKVYDVRKMIAKSEQEIGKATAKYFFYSNIMNFFKTEITLANGEIRKRPLIETNGETGEIVWDKGRDFATVRKVLSMPQVNIVKKTEVQTGGFSKESILPKRNSDKLIARKKDWDPKKYGGFDSPTVAYSVLVVAKVEKGKSKKLKSVKELLGITIMERSSFEKNPIDFLEAKGYKEVKKDLIIKLPKYSLFELENGRKRMLASAGELQKGNELALPSKYVNFLYLASHYEKLKGSPEDNEQKQLFVEQHKHYLDEIIEQISEFSKRVILADANLDKVLSAYNKHRDKPIREQAENIIHLFTLTNLGAPAAFKYFDTTIDRKRYTSTKEVLDATLIHQSITGLYETRIDLSQLGGDGGSGSETPGTSESATPESGGTLGIEDEYRLHETSTEPDVSLGSTWLSDFPQAWAETGGMGLAVRQAPLIIPLKATSTPVSIQQYPMSHEARLGIKPHIQRLLDQGILVPCQSPWNTPLLPVKKPGTNDYRPVQDLREVNKRVEDIHPTVPNPYNLLSGLPPSHQWYTVLDLKDAFFCLRLHPTSQPLFAFEWRDPGMGISGQLTWTRLPQGFKNSPTLFNEALHRDLADFRIQHPDLILLQYVDDILLAATSELDCQQGTRALLQTLGDLGYRASAKKAQICQKQVKYLGYLLREGQRWLTEARKETVMGQPVPKTPRQLREFLGTAGFCRLWIPGFAEMAAPLYPLTKPGTLFSWGPDQQKAYQEIKQALLTAPALGLPDLTKPFELFVDEKQGYAKGVLTQKLGPWRRPVAYLSKKLDPVAAGWPPCLRMVAAIAVLTKDAGKLTMGQPLVILAPHAVEALVKQPPDRWLSNARMTHYQAMLLDTDRVQFGPVVALNPATLLPLPEEGAPHDCLEILAETHGTRPDLTDQPIPDADHTWYTDGSSFLQEGQRKAGAAVTTETEVIWAGALPAGTSAQRAELIALTQALKMAEGKRLNVYTDSRYAFATAHIHGEIYRRRGWLTSEGREIKNKSEILALLKALFLPKRLSIIHCLGHQKGDSAEARGNRLADQAAREAAIKTPPDTSTLLAGKRTADGSEFEKRTADGSEFESPKKKAKVE

SEQ ID NO: 7699 - protein, 2101 aa, synthetic construct
MPAAKRVKLDGGDKKYSIGLDIGTNSVGWAVITDEYKVPSKKFKVLGNTDRHSIKKNLIGALLFDSGETAEATRLKRTARRRYTRRKNRICYLQEIFSNEMAKVDDSFFHRLEESFLVEEDKKHERHPIFGNIVDEVAYHEKYPTIYHLRKKLVDSTDKADLRLIYLALAHMIKFRGHFLIEGDLNPDNSDVDKLFIQLVQTYNQLFEENPINASGVDAKAILSARLSKSRRLENLIAQLPGEKKNGLFGNLIALSLGLTPNFKSNFDLAEDAKLQLSKDTYDDDLDNLLAQIGDQYADLFLAAKNLSDAILLSDILRVNTEITKAPLSASMIKRYDEHHQDLTLLKALVRQQLPEKYKEIFFDQSKNGYAGYIDGGASQEEFYKFIKPILEKMDGTEELLVKLNREDLLRKQRTFDNGSIPHQIHLGELHAILRRQEDFYPFLKDNREKIEKILTFRIPYYVGPLARGNSRFAWMTRKSEETITPWNFEEVVDKGASAQSFIERMTNFDKNLPNEKVLPKHSLLYEYFTVYNELTKVKYVTEGMRKPAFLSGEQKKAIVDLLFKTNRKVTVKQLKEDYFKKIECFDSVEISGVEDRFNASLGTYHDLLKIIKDKDFLDNEENEDILEDIVLTLTLFEDREMIEERLKTYAHLFDDKVMKQLKRRRYTGWGRLSRKLINGIRDKQSGKTILDFLKSDGFANRNFMQLIHDDSLTFKEDIQKAQVSGQGDSLHEHIANLAGSPAIKKGILQTVKVVDELVKVMGRHKPENIVIEMARENQTTQKGQKNSRERMKRIEEGIKELGSQILKEHPVENTQLQNEKLYLYYLQNGRDMYVDQELDINRLSDYDVDHIVPQSFLKDDSIDNKVLTRSDKARGKSDNVPSEEVVKKMKNYWRQLLNAKLITQRKFDNLTKAERGGLSELDKAGFIKRQLVETRQITKHVAQILDSRMNTKYDENDKLIREVKVITLKSKLVSDFRKDFQFYKVREINNYHHAHDAYLNAVVGTALIKKYPKLESEFVYGDYKVYDVRKMIAKSEQEIGKATAKYFFYSNIMNFFKTEITLANGEIRKRPLIETNGETGEIVWDKGRDFATVRKVLSMPQVNIVKKTEVQTGGFSKESILPKRNSDKLIARKKDWDPKKYGGFDSPTVAYSVLVVAKVEKGKSKKLKSVKELLGITIMERSSFEKNPIDFLEAKGYKEVKKDLIIKLPKYSLFELENGRKRMLASAGELQKGNELALPSKYVNFLYLASHYEKLKGSPEDNEQKQLFVEQHKHYLDEIIEQISEFSKRVILADANLDKVLSAYNKHRDKPIREQAENIIHLFTLTNLGAPAAFKYFDTTIDRKRYTSTKEVLDATLIHQSITGLYETRIDLSQLGGDGGSGSETPGTSESATPESGGTLNIEDEYRLHETSKEPDVSLGSTWLSDFPQAWAETGGMGLAVRQAPLIIPLKATSTPVSIKQYPMSQEARLGIKPHIQRLLDQGILVPCQSPWNTPLLPVKKPGTNDYRPVQDLREVNKRVEDIHPTVPNPYNLLSGLPPSHQWYTVLDLKDAFFCLRLHPTSQPLFAFEWRDPEMGISGQLTWTRLPQGFKNSPTLFNEALHRDLAGFRIQHPDLILLQYVDDLLLAATSELDCQQGTRALLQTLGDLGYRASAKKAQICQKQVKYLGYLLKEGQRWLTEARKETVMGQPIPKTPRQLREFLGTAGFCRLWIPGFAEMAAPLYPLTKPGTLFNWGPDQQKAFQEIKQALLTAPALGLPDLTKPFELFVDEKQGYAKGVLTQKLGPWRRPVAYLSKKLDPVAAGWPPCLRMVAAIAVLTKDAGKLTMGQPLVILAPHAVEALVKQPPDRWLSNARMTHYQALLLDTDRVQFGPVVALNPATLLPLPEEGLQHDCLDILAEAHGTRSDLMDQPLPDADHTWYTDGSSFLQEGQRKAGAAVTTETEVIWARALPAGTSAQRAELIALTQALKMAEGKKLNVYTDSRYAFATAHIHGEIYRRRGWLTSEGKEIKNKDEILALLKALFLPKRLSIIHCPGHQKGNSAEARGNRMADQAAREVATRETPETSTLLAGKRTADGSEFEKRTADGSEFESPKKKAKVE

SEQ ID NO: 7700 - protein, 2101 aa, synthetic construct
MPAAKRVKLDGGDKKYSIGLDIGTNSVGWAVITDEYKVPSKKFKVLGNTDRHSIKKNLIGALLFDSGETAEATRLKRTARRRYTRRKNRICYLQEIFSNEMAKVDDSFFHRLEESFLVEEDKKHERHPIFGNIVDEVAYHEKYPTIYHLRKKLVDSTDKADLRLIYLALAHMIKFRGHFLIEGDLNPDNSDVDKLFIQLVQTYNQLFEENPINASGVDAKAILSARLSKSRRLENLIAQLPGEKKNGLFGNLIALSLGLTPNFKSNFDLAEDAKLQLSKDTYDDDLDNLLAQIGDQYADLFLAAKNLSDAILLSDILRVNTEITKAPLSASMIKRYDEHHQDLTLLKALVRQQLPEKYKEIFFDQSKNGYAGYIDGGASQEEFYKFIKPILEKMDGTEELLVKLNREDLLRKQRTFDNGSIPHQIHLGELHAILRRQEDFYPFLKDNREKIEKILTFRIPYYVGPLARGNSRFAWMTRKSEETITPWNFEEVVDKGASAQSFIERMTNFDKNLPNEKVLPKHSLLYEYFTVYNELTKVKYVTEGMRKPAFLSGEQKKAIVDLLFKTNRKVTVKQLKEDYFKKIECFDSVEISGVEDRFNASLGTYHDLLKIIKDKDFLDNEENEDILEDIVLTLTLFEDREMIEERLKTYAHLFDDKVMKQLKRRRYTGWGRLSRKLINGIRDKQSGKTILDFLKSDGFANRNFMQLIHDDSLTFKEDIQKAQVSGQGDSLHEHIANLAGSPAIKKGILQTVKVVDELVKVMGRHKPENIVIEMARENQTTQKGQKNSRERMKRIEEGIKELGSQILKEHPVENTQLQNEKLYLYYLQNGRDMYVDQELDINRLSDYDVDHIVPQSFLKDDSIDNKVLTRSDKARGKSDNVPSEEVVKKMKNYWRQLLNAKLITQRKFDNLTKAERGGLSELDKAGFIKRQLVETRQITKHVAQILDSRMNTKYDENDKLIREVKVITLKSKLVSDFRKDFQFYKVREINNYHHAHDAYLNAVVGTALIKKYPKLESEFVYGDYKVYDVRKMIAKSEQEIGKATAKYFFYSNIMNFFKTEITLANGEIRKRPLIETNGETGEIVWDKGRDFATVRKVLSMPQVNIVKKTEVQTGGFSKESILPKRNSDKLIARKKDWDPKKYGGFDSPTVAYSVLVVAKVEKGKSKKLKSVKELLGITIMERSSFEKNPIDFLEAKGYKEVKKDLIIKLPKYSLFELENGRKRMLASAGELQKGNELALPSKYVNFLYLASHYEKLKGSPEDNEQKQLFVEQHKHYLDEIIEQISEFSKRVILADANLDKVLSAYNKHRDKPIREQAENIIHLFTLTNLGAPAAFKYFDTTIDRKRYTSTKEVLDATLIHQSITGLYETRIDLSQLGGDGGSGSETPGTSESATPESGGTLNIEDEYRLHETSKGPDVPLGSTWLSDFPQAWAETGGMGLAVRQAPLIIPLKATSTPVSIKQYPMSQEARLGIKPHIQRLLDQGILVPCQSPWNTPLLPVKKPGTNDYRPVQDLREVNKRVEDIHPTVPNPYNLLSGLPPSHQWYTVLDLKDAFFCLRLHPTSQSLFAFEWRDPEMGISGQLTWTRLPQGFKNSPTLFDEALHRDLADFRIQHPDLILLQYVDDLLLAATSELDCQQGTRALLQTLGDLGYRASAKKAQICQKQVKYLGYLLKEGQRWLTEARKETVMGQPTPKTPRQLREFLGTAGFCRLWIPGFAEMAAPLYPLTKTGTLFEWGPDQQKAYQEIKQALLTAPALGLPDLTKPFELFVDEKQGYAKGVLTQKLGPWRRPVAYLSKKLDPVAAGWPPCLRMVAAIAVLTKDAGKLTMGQPLVILAPHAVEALVKQPPDRWLSNARMTHYQALLLDTDRVQFGPIVALNPATLLPLPEEGLQHDCLDILAEAHGTRPDLTDQPLPDADHTWYTDGSSFLQEGQRKAGAAVTTETEVVWAKALPAGTSAQRAELIALTQALKMAEGKKLNVYTDSRYAFATAHIHGEIYRRRGLLTSEGKEIKNKDEILALLKALFLPKRLSIIHCPGHQKGNRAEARGNRMADQAAREVATRETPETSTLLAGKRTADGSEFEKRTADGSEFESPKKKAKVE

SEQ ID NO: 7701 - protein, 2095 aa, synthetic construct
MPAAKRVKLDGGDKKYSIGLDIGTNSVGWAVITDEYKVPSKKFKVLGNTDRHSIKKNLIGALLFDSGETAEATRLKRTARRRYTRRKNRICYLQEIFSNEMAKVDDSFFHRLEESFLVEEDKKHERHPIFGNIVDEVAYHEKYPTIYHLRKKLVDSTDKADLRLIYLALAHMIKFRGHFLIEGDLNPDNSDVDKLFIQLVQTYNQLFEENPINASGVDAKAILSARLSKSRRLENLIAQLPGEKKNGLFGNLIALSLGLTPNFKSNFDLAEDAKLQLSKDTYDDDLDNLLAQIGDQYADLFLAAKNLSDAILLSDILRVNTEITKAPLSASMIKRYDEHHQDLTLLKALVRQQLPEKYKEIFFDQSKNGYAGYIDGGASQEEFYKFIKPILEKMDGTEELLVKLNREDLLRKQRTFDNGSIPHQIHLGELHAILRRQEDFYPFLKDNREKIEKILTFRIPYYVGPLARGNSRFAWMTRKSEETITPWNFEEVVDKGASAQSFIERMTNFDKNLPNEKVLPKHSLLYEYFTVYNELTKVKYVTEGMRKPAFLSGEQKKAIVDLLFKTNRKVTVKQLKEDYFKKIECFDSVEISGVEDRFNASLGTYHDLLKIIKDKDFLDNEENEDILEDIVLTLTLFEDREMIEERLKTYAHLFDDKVMKQLKRRRYTGWGRLSRKLINGIRDKQSGKTILDFLKSDGFANRNFMQLIHDDSLTFKEDIQKAQVSGQGDSLHEHIANLAGSPAIKKGILQTVKVVDELVKVMGRHKPENIVIEMARENQTTQKGQKNSRERMKRIEEGIKELGSQILKEHPVENTQLQNEKLYLYYLQNGRDMYVDQELDINRLSDYDVDHIVPQSFLKDDSIDNKVLTRSDKARGKSDNVPSEEVVKKMKNYWRQLLNAKLITQRKFDNLTKAERGGLSELDKAGFIKRQLVETRQITKHVAQILDSRMNTKYDENDKLIREVKVITLKSKLVSDFRKDFQFYKVREINNYHHAHDAYLNAVVGTALIKKYPKLESEFVYGDYKVYDVRKMIAKSEQEIGKATAKYFFYSNIMNFFKTEITLANGEIRKRPLIETNGETGEIVWDKGRDFATVRKVLSMPQVNIVKKTEVQTGGFSKESILPKRNSDKLIARKKDWDPKKYGGFDSPTVAYSVLVVAKVEKGKSKKLKSVKELLGITIMERSSFEKNPIDFLEAKGYKEVKKDLIIKLPKYSLFELENGRKRMLASAGELQKGNELALPSKYVNFLYLASHYEKLKGSPEDNEQKQLFVEQHKHYLDEIIEQISEFSKRVILADANLDKVLSAYNKHRDKPIREQAENIIHLFTLTNLGAPAAFKYFDTTIDRKRYTSTKEVLDATLIHQSITGLYETRIDLSQLGGDGGSGSETPGTSESATPESGGTLQLDDEYRLYSPLVKPDQNIQFWLEQFPQAWAETAGMGLAKQVPPQVIQLKASATPVSVRQYPLSKEAQEGIRPHVQRLIQQGILVPVQSPWNTPLLPVRKPGTNDYRPVQDLREVNKRVQDIHPTVPNPYNLLCALPPQRSWYTVLDLKDAFFCLRLHPTSQPLFAFEWRDPGTGRTGQLTWTRLPQGFKNSPTIFDEALHRDLANFRIQHPQVTLLQYVDDLLLAGATKQDCLEGTKALLLELSDLGYRASAKKAQICRREVTYLGYSLRDGQRWLTEARKKTVVQIPAPTTAKQVREFLGTAGFCRLWIPGFATLAAPLYPLTKEKGEFSWAPEHQKAFDAIKKALLSAPALALPDVTKPFTLYVDERKGVARGVLTQTLGPWRRPVAYLSKKLDPVASGWPVCLKAIAAVAILVKDADKLTLGQNITVIAPHALENIVRQPPDRWMTNARMTHYQSLLLTERVTFAPPAALNPATLLPEETDEPVTHDCHQLLIEETGVRKDLTDIPLTGEVLTWFTDGSSYVVEGKRMAGAAVVDGTRTIWASSLPEGTSAQKAELMALTQALRLAEGKSINIYTDSRYAFATAHVHGAIYKQRGLLTSAGREIKNKEEILSLLEALHLPKRLAIIHCPGHQKAKDPISRGNQMADRVAKQAAQGVNLLAGKRTADGSEFEKRTADGSEFESPKKKAKVE

SEQ ID NO: 7702 - protein, 2095 aa, synthetic construct; identical to SEQ ID NO: 7701

SEQ ID NO: 7703 - protein, 2181 aa, synthetic construct
MPAAKRVKLDGGDKKYSIGLDIGTNSVGWAVITDEYKVPSKKFKVLGNTDRHSIKKNLIGALLFDSGETAEATRLKRTARRRYTRRKNRICYLQEIFSNEMAKVDDSFFHRLEESFLVEEDKKHERHPIFGNIVDEVAYHEKYPTIYHLRKKLVDSTDKADLRLIYLALAHMIKFRGHFLIEGDLNPDNSDVDKLFIQLVQTYNQLFEENPINASGVDAKAILSARLSKSRRLENLIAQLPGEKKNGLFGNLIALSLGLTPNFKSNFDLAEDAKLQLSKDTYDDDLDNLLAQIGDQYADLFLAAKNLSDAILLSDILRVNTEITKAPLSASMIKRYDEHHQDLTLLKALVRQQLPEKYKEIFFDQSKNGYAGYIDGGASQEEFYKFIKPILEKMDGTEELLVKLNREDLLRKQRTFDNGSIPHQIHLGELHAILRRQEDFYPFLKDNREKIEKILTFRIPYYVGPLARGNSRFAWMTRKSEETITPWNFEEVVDKGASAQSFIERMTNFDKNLPNEKVLPKHSLLYEYFTVYNELTKVKYVTEGMRKPAFLSGEQKKAIVDLLFKTNRKVTVKQLKEDYFKKIECFDSVEISGVEDRFNASLGTYHDLLKIIKDKDFLDNEENEDILEDIVLTLTLFEDREMIEERLKTYAHLFDDKVMKQLKRRRYTGWGRLSRKLINGIRDKQSGKTILDFLKSDGFANRNFMQLIHDDSLTFKEDIQKAQVSGQGDSLHEHIANLAGSPAIKKGILQTVKVVDELVKVMGRHKPENIVIEMARENQTTQKGQKNSRERMKRIEEGIKELGSQILKEHPVENTQLQNEKLYLYYLQNGRDMYVDQELDINRLSDYDVDHIVPQSFLKDDSIDNKVLTRSDKARGKSDNVPSEEVVKKMKNYWRQLLNAKLITQRKFDNLTKAERGGLSELDKAGFIKRQLVETRQITKHVAQILDSRMNTKYDENDKLIREVKVITLKSKLVSDFRKDFQFYKVREINNYHHAHDAYLNAVVGTALIKKYPKLESEFVYGDYKVYDVRKMIAKSEQEIGKATAKYFFYSNIMNFFKTEITLANGEIRKRPLIETNGETGEIVWDKGRDFATVRKVLSMPQVNIVKKTEVQTGGFSKESILPKRNSDKLIARKKDWDPKKYGGFDSPTVAYSVLVVAKVEKGKSKKLKSVKELLGITIMERSSFEKNPIDFLEAKGYKEVKKDLIIKLPKYSLFELENGRKRMLASAGELQKGNELALPSKYVNFLYLASHYEKLKGSPEDNEQKQLFVEQHKHYLDEIIEQISEFSKRVILADANLDKVLSAYNKHRDKPIREQAENIIHLFTLTNLGAPAAFKYFDTTIDRKRYTSTKEVLDATLIHQSITGLYETRIDLSQLGGDGGSGSETPGTSESATPESGGMDPLQLLQPLEAEIKGTKLKAHWNSGATITCVPEAFLEDERPIQTMLIKTIHGEKQQDVYYLTFKVQGRKVEAEVLASPYDYILLNPSDVPWLMKKPLQLTVLVPLHEYQERLLQQTALPKEQKELLQKLFLKYDALWQHWENQVGHRRIKPHNIATGTLAPRPQKQYPINPKAKPSIQIVIDDLLKQGVLIQQNSTMNTPVYPVPKPDGKWRMVLDYREVNKTIPLIAAQNQHSAGILSSIYRGKYKTTLDLTNGFWAHPITPESYWLTAFTWQGKQYCWTRLPQGFLNSPALFNADVVDLLKEIPNVQAYVDDIYISHDDPQEHLEQLEKIFSILLNAGYVVSLKKSEIAQREVEFLGFNITKEGRGLTDTFKQKLLNITPPKDLKQLQSILGLLNFARNFIPNYSELVKPLYTIVAPANGKFISWTEDNSNQLQHIISVLNQADNLEERNPETRLIIKVNSSPSAGYIRYYNEGSKRPIMYVNYIFSKAEAKFTQTEKLLTTMHKGLIKAMDLAMGQEILVYSPIVSMTKIQRTPLPERKALPVRWITWMTYLEDPRIQFHYDKSLPELQQIPNVTEDVIAKTKHPSEFAMVFYTDGSAIKHPDVNKSHSAGMGIAQVQFIPEYKIVHQWSIPLGDHTAQLAEIAAVEFACKKALKISGPVLIVTDSFYVAESANKELPYWKSNGFLNNKKKPLRHVSKWKSIAECLQLKPDIIIMHEKGHQQPMTTLHTEGNNLADKLATQGSYVVHAGKRTADGSEFEKRTADGSEFESPKKKAKVE

SEQ ID NO: 7704 - protein, 2092 aa, synthetic construct
MPAAKRVKLDGGDKKYSIGLDIGTNSVGWAVITDEYKVPSKKFKVLGNTDRHSIKKNLIGALLFDSGETAEATRLKRTARRRYTRRKNRICYLQEIFSNEMAKVDDSFFHRLEESFLVEEDKKHERHPIFGNIVDEVAYHEKYPTIYHLRKKLVDSTDKADLRLIYLALAHMIKFRGHFLIEGDLNPDNSDVDKLFIQLVQTYNQLFEENPINASGVDAKAILSARLSKSRRLENLIAQLPGEKKNGLFGNLIALSLGLTPNFKSNFDLAEDAKLQLSKDTYDDDLDNLLAQIGDQYADLFLAAKNLSDAILLSDILRVNTEITKAPLSASMIKRYDEHHQDLTLLKALVRQQLPEKYKEIFFDQSKNGYAGYIDGGASQEEFYKFIKPILEKMDGTEELLVKLNREDLLRKQRTFDNGSIPHQIHLGELHAILRRQEDFYPFLKDNREKIEKILTFRIPYYVGPLARGNSRFAWMTRKSEETITPWNFEEVVDKGASAQSFIERMTNFDKNLPNEKVLPKHSLLYEYFTVYNELTKVKYVTEGMRKPAFLSGEQKKAIVDLLFKTNRKVTVKQLKEDYFKKIECFDSVEISGVEDRFNASLGTYHDLLKIIKDKDFLDNEENEDILEDIVLTLTLFEDREMIEERLKTYAHLFDDKVMKQLKRRRYTGWGRLSRKLINGIRDKQSGKTILDFLKSDGFANRNFMQLIHDDSLTFKEDIQKAQVSGQGDSLHEHIANLAGSPAIKKGILQTVKVVDELVKVMGRHKPENIVIEMARENQTTQKGQKNSRERMKRIEEGIKELGSQILKEHPVENTQLQNEKLYLYYLQNGRDMYVDQELDINRLSDYDVDHIVPQSFLKDDSIDNKVLTRSDKARGKSDNVPSEEVVKKMKNYWRQLLNAKLITQRKFDNLTKAERGGLSELDKAGFIKRQLVETRQITKHVAQILDSRMNTKYDENDKLIREVKVITLKSKLVSDFRKDFQFYKVREINNYHHAHDAYLNAVVGTALIKKYPKLESEFVYGDYKVYDVRKMIAKSEQEIGKATAKYFFYSNIMNFFKTEITLANGEIRKRPLIETNGETGEIVWDKGRDFATVRKVLSMPQVNIVKKTEVQTGGFSKESILPKRNSDKLIARKKDWDPKKYGGFDSPTVAYSVLVVAKVEKGKSKKLKSVKELLGITIMERSSFEKNPIDFLEAKGYKEVKKDLIIKLPKYSLFELENGRKRMLASAGELQKGNELALPSKYVNFLYLASHYEKLKGSPEDNEQKQLFVEQHKHYLDEIIEQISEFSKRVILADANLDKVLSAYNKHRDKPIREQAENIIHLFTLTNLGAPAAFKYFDTTIDRKRYTSTKEVLDATLIHQSITGLYETRIDLSQLGGDGGSGSETPGTSESATPESGGIPWLMKKPLQLTTLVPLQEYEERLLKQTMLTGSYKEKLQSLFLKYDALWQHWENQVGHRRIKPHHIATGTVNPRPQKQYPINPKAKASIQTVINDLLKQGVLIQQNSIMNTPVYPVPKPDGKWRMVLDYREVNKTIPLIAAQNQHSAGILSSIFRGKYKTTLDLSNGFWAHSITPESYWLTAFTWLGQQYCWTRLPQGFLNSPALFTADVVDLLKEVPNVQVYVDDIYISHDDPREHLEQLEKVFSLLLNAGYVVSLKKSEIAQHEVEFLGFNITKEGRGLTETFKQKLLNITPPRDLKQLQSILGLLNFARNFIPNFSELVKPLYNIIATANGKYITWTTDNSQQLQNIISMLNSAENLEERNPEVRLIMKVNTSPSAGYIRFYNEFAKRPIMYLNYVYTKAEVKFTNTEKLLTTIHKGLIKALDLGMGQEILVYSPIVSMTKIQKTPLPERKALPIRWITWMSYLEDPRIQFHYDKTLPELQQVPTVTDDIIAKIKHPSEFSMVFYTDGSAIKHPNVNKSHNAGMGIAQVQFKPEFTVINTWSIPLGDHTAQLAEVAAVEFACKKALKIDGPVLIVTDSFYVAESVNKELPYWQSNGFFNNKKKPLKHVSKWKSIADCIQLKPDIIIIHEKGHQPTASTFHTEGNNLADKLATQGSYVVNAGKRTADGSEFEKRTADGSEFESPKKKAKVE

SEQ ID NO: 7705 - protein, 2181 aa, synthetic construct
MPAAKRVKLDGGDKKYSIGLDIGTNSVGWAVITDEYKVPSKKFKVLGNTDRHSIKKNLIGALLFDSGETAEATRLKRTARRRYTRRKNRICYLQEIFSNEMAKVDDSFFHRLEESFLVEEDKKHERHPIFGNIVDEVAYHEKYPTIYHLRKKLVDSTDKADLRLIYLALAHMIKFRGHFLIEGDLNPDNSDVDKLFIQLVQTYNQLFEENPINASGVDAKAILSARLSKSRRLENLIAQLPGEKKNGLFGNLIALSLGLTPNFKSNFDLAEDAKLQLSKDTYDDDLDNLLAQIGDQYADLFLAAKNLSDAILLSDILRVNTEITKAPLSASMIKRYDEHHQDLTLLKALVRQQLPEKYKEIFFDQSKNGYAGYIDGGASQEEFYKFIKPILEKMDGTEELLVKLNREDLLRKQRTFDNGSIPHQIHLGELHAILRRQEDFYPFLKDNREKIEKILTFRIPYYVGPLARGNSRFAWMTRKSEETITPWNFEEVVDKGASAQSFIERMTNFDKNLPNEKVLPKHSLLYEYFTVYNELTKVKYVTEGMRKPAFLSGEQKKAIVDLLFKTNRKVTVKQLKEDYFKKIECFDSVEISGVEDRFNASLGTYHDLLKIIKDKDFLDNEENEDILEDIVLTLTLFEDREMIEERLKTYAHLFDDKVMKQLKRRRYTGWGRLSRKLINGIRDKQSGKTILDFLKSDGFANRNFMQLIHDDSLTFKEDIQKAQVSGQGDSLHEHIANLAGSPAIKKGILQTVKVVDELVKVMGRHKPENIVIEMARENQTTQKGQKNSRERMKRIEEGIKELGSQILKEHPVENTQLQNEKLYLYYLQNGRDMYVDQELDINRLSDYDVDHIVPQSFLKDDSIDNKVLTRSDKARGKSDNVPSEEVVKKMKNYWRQLLNAKLITQRKFDNLTKAERGGLSELDKAGFIKRQLVETRQITKHVAQILDSRMNTKYDENDKLIREVKVITLKSKLVSDFRKDFQFYKVREINNYHHAHDAYLNAVVGTALIKKYPKLESEFVYGDYKVYDVRKMIAKSEQEIGKATAKYFFYSNIMNFFKTEITLANGEIRKRPLIETNGETGEIVWDKGRDFATVRKVLSMPQVNIVKKTEVQTGGFSKESILPKRNSDKLIARKKDWDPKKYGGFDSPTVAYSVLVVAKVEKGKSKKLKSVKELLGITIMERSSFEKNPIDFLEAKGYKEVKKDLIIKLPKYSLFELENGRKRMLASAGELQKGNELALPSKYVNFLYLASHYEKLKGSPEDNEQKQLFVEQHKHYLDEIIEQISEFSKRVILADANLDKVLSAYNKHRDKPIREQAENIIHLFTLTNLGAPAAFKYFDTTIDRKRYTSTKEVLDATLIHQSITGLYETRIDLSQLGGDGGSGSETPGTSESATPESGGMDPLQLLQPLEAEIKGTKLKAHWNSGATITCVPQAFLEEEVPIKNIWIKTIHGEKEQPVYYLTFKIQGRKVEAEVISSPYDYILVSPSDIPWLMKKPLQLTTLVPLQEYEERLLKQTMLTGSYKEKLQSLFLKYDALWQHWENQVGHRRIKPHHIATGTVNPRPQKQYPINPKAKASIQTVINDLLKQGVLIQQNSIMNTPVYPVPKPDGKWRMVLDYREVNKTIPLIAAQNQHSAGILSSIFRGKYKTTLDLSNGFWAHSITPESYWLTAFTWLGQQYCWTRLPQGFLNSPALFNADVVDLLKEVPNVQVYVDDIYISHDDPREHLEQLEKVFSLLLNAGYVVSLKKSEIAQHEVEFLGFNITKEGRGLTETFKQKLLNITPPRDLKQLQSILGLLNFARNFIPNFSELVKPLYNIIATAPGKYITWTTDNSQQLQNIISMLNSAENLEERNPEVRLIMKVNTSPSAGYIRFYNEFAKRPIMYLNYVYTKAEVKFTNTEKLLTTIHKGLIKALDLGMGQEILVYSPIVSMTKIQKTPLPERKALPIRWITWMSYLEDPRIQFHYDKTLPELQQVPTVTDDIIAKIKHPSEFSMVFYTDGSAIKHPNVNKSHNAGMGIAQVQFKPEFTVINTWSIPLGDHTAQLAEVAAVEFACKKALKIDGPVLIVTDSFYVAESVNKELPYWQSNGFFNNKKKPLKHVSKWKSIADCIQLKPDIIIIHEKGHQPTASTFHTEGNNLADKLATQGSYVVNAGKRTADGSEFEKRTADGSEFESPKKKAKVE

SEQ ID NO: 7706 - protein, 2101 aa, synthetic construct
MPAAKRVKLDGGDKKYSIGLDIGTNSVGWAVITDEYKVPSKKFKVLGNTDRHSIKKNLIGALLFDSGETAEATRLKRTARRRYTRRKNRICYLQEIFSNEMAKVDDSFFHRLEESFLVEEDKKHERHPIFGNIVDEVAYHEKYPTIYHLRKKLVDSTDKADLRLIYLALAHMIKFRGHFLIEGDLNPDNSDVDKLFIQLVQTYNQLFEENPINASGVDAKAILSARLSKSRRLENLIAQLPGEKKNGLFGNLIALSLGLTPNFKSNFDLAEDAKLQLSKDTYDDDLDNLLAQIGDQYADLFLAAKNLSDAILLSDILRVNTEITKAPLSASMIKRYDEHHQDLTLLKALVRQQLPEKYKEIFFDQSKNGYAGYIDGGASQEEFYKFIKPILEKMDGTEELLVKLNREDLLRKQRTFDNGSIPHQIHLGELHAILRRQEDFYPFLKDNREKIEKILTFRIPYYVGPLARGNSRFAWMTRKSEETITPWNFEEVVDKGASAQSFIERMTNFDKNLPNEKVLPKHSLLYEYFTVYNELTKVKYVTEGMRKPAFLSGEQKKAIVDLLFKTNRKVTVKQLKEDYFKKIECFDSVEISGVEDRFNASLGTYHDLLKIIKDKDFLDNEENEDILEDIVLTLTLFEDREMIEERLKTYAHLFDDKVMKQLKRRRYTGWGRLSRKLINGIRDKQSGKTILDFLKSDGFANRNFMQLIHDDSLTFKEDIQKAQVSGQGDSLHEHIANLAGSPAIKKGILQTVKVVDELVKVMGRHKPENIVIEMARENQTTQKGQKNSRERMKRIEEGIKELGSQILKEHPVENTQLQNEKLYLYYLQNGRDMYVDQELDINRLSDYDVDHIVPQSFLKDDSIDNKVLTRSDKARGKSDNVPSEEVVKKMKNYWRQLLNAKLITQRKFDNLTKAERGGLSELDKAGFIKRQLVETRQITKHVAQILDSRMNTKYDENDKLIREVKVITLKSKLVSDFRKDFQFYKVREINNYHHAHDAYLNAVVGTALIKKYPKLESEFVYGDYKVYDVRKMIAKSEQEIGKATAKYFFYSNIMNFFKTEITLANGEIRKRPLIETNGETGEIVWDKGRDFATVRKVLSMPQVNIVKKTEVQTGGFSKESILPKRNSDKLIARKKDWDPKKYGGFDSPTVAYSVLVVAKVEKGKSKKLKSVKELLGITIMERSSFEKNPIDFLEAKGYKEVKKDLIIKLPKYSLFELENGRKRMLASAGELQKGNELALPSKYVNFLYLASHYEKLKGSPEDNEQKQLFVEQHKHYLDEIIEQISEFSKRVILADANLDKVLSAYNKHRDKPIREQAENIIHLFTLTNLGAPAAFKYFDTTIDRKRYTSTKEVLDATLIHQSITGLYETRIDLSQLGGDGGSGSETPGTSESATPESGGTLNIEDEYRLHETSKEPDVPLGSTWLSDFPQAWAETGGMGLAVRQAPLIIPLKATSTPVSIKQYPMSQEARLGIKPHIQRLLDQGILVPCQSPWNTPLLPVKKPGTNDYRPVQDLREVNKRVEDIHPTVPNPYNLLSGLPPSHQWYTVLDLKDAFFCLRLHPTSQPLFAFEWRDPEMGISGQLTWTRLPQGFKNSPTLFNEALHRDLADFRIQHPDLILLQYVDDLLLAATSEQDCQRGTRALLQTLGNLGYRASAKKAQICQKQVKYLGYLLKEGQRWLTEARKETVMGQPTPKTPRQLREFLGTAGFCRLWIPGFAEMAAPLYPLTKPGTLFNWGPDQQKAYQEIKQALLTAPALGLPDLTKPFELFVDEKQGYAKGVLTQKLGPWRRPVAYLSKKLDPVAAGWPPCLRMVAAIAVLTKDAGKLTMGQPLVILAPHAVEALVKQPPDRWLSNARMTHYQAMLLDTDRVQFGPVVALNPATLLPLPEKEAPHDCLEILAETHGTRPDLTDQPIPDADYTWYTDGSSFLQEGQRRAGAAVTTETEVIWARALPAGTSAQRAELIALTQALKMAEGKKLNVYTDSRYAFATAHVHGEIYRRRGWLTSEGREIKNKNEILALLKALFLPKRLSIIHCPGHQKGNSAEARGNRMADQAAREAAMKAVLETSTLLAGKRTADGSEFEKRTADGSEFESPKKKAKVE

SEQ ID NO: 7707 - protein, 2099 aa, synthetic construct
MPAAKRVKLDGGDKKYSIGLDIGTNSVGWAVITDEYKVPSKKFKVLGNTDRHSIKKNLIGALLFDSGETAEATRLKRTARRRYTRRKNRICYLQEIFSNEMAKVDDSFFHRLEESFLVEEDKKHERHPIFGNIVDEVAYHEKYPTIYHLRKKLVDSTDKADLRLIYLALAHMIKFRGHFLIEGDLNPDNSDVDKLFIQLVQTYNQLFEENPINASGVDAKAILSARLSKSRRLENLIAQLPGEKKNGLFGNLIALSLGLTPNFKSNFDLAEDAKLQLSKDTYDDDLDNLLAQIGDQYADLFLAAKNLSDAILLSDILRVNTEITKAPLSASMIKRYDEHHQDLTLLKALVRQQLPEKYKEIFFDQSKNGYAGYIDGGASQEEFYKFIKPILEKMDGTEELLVKLNREDLLRKQRTFDNGSIPHQIHLGELHAILRRQEDFYPFLKDNREKIEKILTFRIPYYVGPLARGNSRFAWMTRKSEETITPWNFEEVVDKGASAQSFIERMTNFDKNLPNEKVLPKHSLLYEYFTVYNELTKVKYVTEGMRKPAFLSGEQKKAIVDLLFKTNRKVTVKQLKEDYFKKIECFDSVEISGVEDRFNASLGTYHDLLKIIKDKDFLDNEENEDILEDIVLTLTLFEDREMIEERLKTYAHLFDDKVMKQLKRRRYTGWGRLSRKLINGIRDKQSGKTILDFLKSDGFANRNFMQLIHDDSLTFKEDIQKAQVSGQGDSLHEHIANLAGSPAIKKGILQTVKVVDELVKVMGRHKPENIVIEMARENQTTQKGQKNSRERMKRIEEGIKELGSQILKEHPVENTQLQNEKLYLYYLQNGRDMYVDQELDINRLSDYDVDHIVPQSFLKDDSIDNKVLTRSDKARGKSDNVPSEEVVKKMKNYWRQLLNAKLITQRKFDNLTKAERGGLSELDKAGFIKRQLVETRQITKHVAQILDSRMNTKYDENDKLIREVKVITLKSKLVSDFRKDFQFYKVREINNYHHAHDAYLNAVVGTALIKKYPKLESEFVYGDYKVYDVRKMIAKSEQEIGKATAKYFFYSNIMNFFKTEITLANGEIRKRPLIETNGETGEIVWDKGRDFATVRKVLSMPQVNIVKKTEVQTGGFSKESILPKRNSDKLIARKKDWDPKKYGGFDSPTVAYSVLVVAKVEKGKSKKLKSVKELLGITIMERSSFEKNPIDFLEAKGYKEVKKDLIIKLPKYSLFELENGRKRMLASAGELQKGNELALPSKYVNFLYLASHYEKLKGSPEDNEQKQLFVEQHKHYLDEIIEQISEFSKRVILADANLDKVLSAYNKHRDKPIREQAENIIHLFTLTNLGAPAAFKYFDTTIDRKRYTSTKEVLDATLIHQSITGLYETRIDLSQLGGDGGGSAGSAAGSGEFGGTAPLEEEYRLFLEAPIQNVTLLEQWKREIPKVWAEINPPGLASTQAPIHVQLLSTALPVRVRQYPITLEAKRSLRETIRKFRAAGILRPVHSPWNTPLLPVRKSGTSEYRMVQDLREVNKRVETIHPTVPNPYTLLSLLPPDRIWYSVLDLKDAFFCIPLAPESQLIFAFEWADAEEGESGQLTWTRLPQGFKNSPTLFNEALNRDLQGFRLDHPSVSLLQYVDDLLIAADTQAACLSATRDLLMTLAELGYRVSGKKAQLCQEEVTYLGFKIHKGSRSLSNSRTQAILQIPVPKTKRQVREFLGTIGYCRLWIPGFAELAQPLYAATRPGNDPLVWGEKEEEAFQSLKLALTQPPALALPSLDKPFQLFVEETSGAAKGVLTQALGPWKRPVAYLSKRLDPVAAGWPRCLRAIAAAALLTREASKLTFGQDIEITSSHNLESLLRSPPDKWLTNARITQYQVLLLDPPRVRFKQTAALNPATLLPETDDTLPIHHCLDTLDSLTSTRPDLTDQPLAQAEATLFTDGSSYIRDGKRYAGAAVVTLDSVIWAEPLPIGTSAQKAELIALTKALEWSKDKSVNIYTDSRYAFATLHVHGMIYRERGWLTAGGKAIKNAPEILALLTAVWLPKRVAVMHCKGHQKDDAPTSTGNRRADEVAREVAIRPLSTQATISAGKRTADGSEFEKRTADGSEFESPKKKAKVE

SEQ ID NO: 7708 - protein, 2002 aa, synthetic construct
MPAAKRVKLDGGDKKYSIGLDIGTNSVGWAVITDEYKVPSKKFKVLGNTDRHSIKKNLIGALLFDSGETAEATRLKRTARRRYTRRKNRICYLQEIFSNEMAKVDDSFFHRLEESFLVEEDKKHERHPIFGNIVDEVAYHEKYPTIYHLRKKLVDSTDKADLRLIYLALAHMIKFRGHFLIEGDLNPDNSDVDKLFIQLVQTYNQLFEENPINASGVDAKAILSARLSKSRRLENLIAQLPGEKKNGLFGNLIALSLGLTPNFKSNFDLAEDAKLQLSKDTYDDDLDNLLAQIGDQYADLFLAAKNLSDAILLSDILRVNTEITKAPLSASMIKRYDEHHQDLTLLKALVRQQLPEKYKEIFFDQSKNGYAGYIDGGASQEEFYKFIKPILEKMDGTEELLVKLNREDLLRKQRTFDNGSIPHQIHLGELHAILRRQEDFYPFLKDNREKIEKILTFRIPYYVGPLARGNSRFAWMTRKSEETITPWNFEEVVDKGASAQSFIERMTNFDKNLPNEKVLPKHSLLYEYFTVYNELTKVKYVTEGMRKPAFLSGEQKKAIVDLLFKTNRKVTVKQLKEDYFKKIECFDSVEISGVEDRFNASLGTYHDLLKIIKDKDFLDNEENEDILEDIVLTLTLFEDREMIEERLKTYAHLFDDKVMKQLKRRRYTGWGRLSRKLINGIRDKQSGKTILDFLKSDGFANRNFMQLIHDDSLTFKEDIQKAQVSGQGDSLHEHIANLAGSPAIKKGILQTVKVVDELVKVMGRHKPENIVIEMARENQTTQKGQKNSRERMKRIEEGIKELGSQILKEHPVENTQLQNEKLYLYYLQNGRDMYVDQELDINRLSDYDVDHIVPQSFLKDDSIDNKVLTRSDKARGKSDNVPSEEVVKKMKNYWRQLLNAKLITQRKFDNLTKAERGGLSELDKAGFIKRQLVETRQITKHVAQILDSRMNTKYDENDKLIREVKVITLKSKLVSDFRKDFQFYKVREINNYHHAHDAYLNAVVGTALIKKYPKLESEFVYGDYKVYDVRKMIAKSEQEIGKATAKYFFYSNIMNFFKTEITLANGEIRKRPLIETNGETGEIVWDKGRDFATVRKVLSMPQVNIVKKTEVQTGGFSKESILPKRNSDKLIARKKDWDPKKYGGFDSPTVAYSVLVVAKVEKGKSKKLKSVKELLGITIMERSSFEKNPIDFLEAKGYKEVKKDLIIKLPKYSLFELENGRKRMLASAGELQKGNELALPSKYVNFLYLASHYEKLKGSPEDNEQKQLFVEQHKHYLDEIIEQISEFSKRVILADANLDKVLSAYNKHRDKPIREQAENIIHLFTLTNLGAPAAFKYFDTTIDRKRYTSTKEVLDATLIHQSITGLYETRIDLSQLGGDGGGSAGSAAGSGEFGGGVLDTPPSHIGLEHLPPPPEVPQFPLNLERLQALQDLVHRSLEAGYISPWDGPGNNPVFPVRKPNGAWRFVHDLRATNALTKPIPALSPGPPDLTAPPTHPPHIICLDLKDAFFQIPVEDRFRFYLSFTLPSPGGLQPHRRFAWRVLPQGFINSPALFQRALQEPLRQVSAAFSQSLLVSYMDDILYASPTEEQRSQCYQALAARLRDLGFQVASEKTSQTPSPVPFLGQMVHEQIVTYQSLPTLQISSPISLHQLQAVLGDLQWVSRGTPTTRRPLQLLYSSLKRHHDPRAIIQLSPEQLQGIAELRQALSHNARSRYNEQEPLLAYVHLTRAGSTLVLFQKGAQFPLAYFQTPLTDNQASPWGLLLLLGCQYLQTQALSSYAKPILKYYHNLPKTSLDNWIQSSEDPRVQELLQLWPQISSQGIQPPGPWKTLITRAEVFLTPQFSPDPIPAALCLFSDGATGRGAYCLWKDHLLDFQAVPAPESAQKGELAGLLAGLAAAPPEPVNIWVDSKYLYSLLRTWVLGAWLQPDPVPSYALLYKSLLRHPAIVVGHVRSHSSASHPIASLNNYVDQLAGKRTADGSEFEKRTADGSEFESPKKKAKVE

SEQ ID NO: 7709 - protein, 2088 aa, synthetic construct
MPAAKRVKLDGGDKKYSIGLDIGTNSVGWAVITDEYKVPSKKFKVLGNTDRHSIKKNLIGALLFDSGETAEATRLKRTARRRYTRRKNRICYLQEIFSNEMAKVDDSFFHRLEESFLVEEDKKHERHPIFGNIVDEVAYHEKYPTIYHLRKKLVDSTDKADLRLIYLALAHMIKFRGHFLIEGDLNPDNSDVDKLFIQLVQTYNQLFEENPINASGVDAKAILSARLSKSRRLENLIAQLPGEKKNGLFGNLIALSLGLTPNFKSNFDLAEDAKLQLSKDTYDDDLDNLLAQIGDQYADLFLAAKNLSDAILLSDILRVNTEITKAPLSASMIKRYDEHHQDLTLLKALVRQQLPEKYKEIFFDQSKNGYAGYIDGGASQEEFYKFIKPILEKMDGTEELLVKLNREDLLRKQRTFDNGSIPHQIHLGELHAILRRQEDFYPFLKDNREKIEKILTFRIPYYVGPLARGNSRFAWMTRKSEETITPWNFEEVVDKGASAQSFIERMTNFDKNLPNEKVLPKHSLLYEYFTVYNELTKVKYVTEGMRKPAFLSGEQKKAIVDLLFKTNRKVTVKQLKEDYFKKIECFDSVEISGVEDRFNASLGTYHDLLKIIKDKDFLDNEENEDILEDIVLTLTLFEDREMIEERLKTYAHLFDDKVMKQLKRRRYTGWGRLSRKLINGIRDKQSGKTILDFLKSDGFANRNFMQLIHDDSLTFKEDIQKAQVSGQGDSLHEHIANLAGSPAIKKGILQTVKVVDELVKVMGRHKPENIVIEMARENQTTQKGQKNSRERMKRIEEGIKELGSQILKEHPVENTQLQNEKLYLYYLQNGRDMYVDQELDINRLSDYDVDHIVPQSFLKDDSIDNKVLTRSDKARGKSDNVPSEEVVKKMKNYWRQLLNAKLITQRKFDNLTKAERGGLSELDKAGFIKRQLVETRQITKHVAQILDSRMNTKYDENDKLIREVKVITLKSKLVSDFRKDFQFYKVREINNYHHAHDAYLNAVVGTALIKKYPKLESEFVYGDYKVYDVRKMIAKSEQEIGKATAKYFFYSNIMNFFKTEITLANGEIRKRPLIETNGETGEIVWDKGRDFATVRKVLSMPQVNIVKKTEVQTGGFSKESILPKRNSDKLIARKKDWDPKKYGGFDSPTVAYSVLVVAKVEKGKSKKLKSVKELLGITIMERSSFEKNPIDFLEAKGYKEVKKDLIIKLPKYSLFELENGRKRMLASAGELQKGNELALPSKYVNFLYLASHYEKLKGSPEDNEQKQLFVEQHKHYLDEIIEQISEFSKRVILADANLDKVLSAYNKHRDKPIREQAENIIHLFTLTNLGAPAAFKYFDTTIDRKRYTSTKEVLDATLIHQSITGLYETRIDLSQLGGDGGGSAGSAAGSGEFGGVPWILKKPLELTIKLDLEEQQGTLLNNSILSKKGKEELKQLFEKYSALWQSWENQVGHRRIRPHKIATGTVKPTPQKQYHINPKAKPDIQIVINDLLKQGVLIQKESTMNTPVYPVPKPNGRWRMVLDYRAVNKVTPLIAVQNQHSYGILGSLFKGRYKTTIDLSNGFWAHPIVPEDYWITAFTWQGKQYCWTVLPQGFLNSPGLFTGDVVDLLQGIPNVEVYVDDVYISHDSEKEHLEYLDILFNRLKEAGYIISLKKSNIANSIVDFLGFQITNEGRGLTDTFKEKLENITAPTTLKQLQSILGLLNFARNFIPDFTELIAPLYALIPKSTKNYVPWQIEHSTTLETLITKLNGAEYLQGRKGDKTLIMKVNASYTTGYIRYYNEGEKKPISYVSIVFSKTELKFTELEKLLTTVHKGLLKALDLSMGQNIHVYSPIVSMQNIQKTPQTAKKALASRWLSWLSYLEDPRIRFFYDPQMPALKDLPAVDTGKDNKKHPSNFQHIFYTDGSAITSPTKEGHLNAGMGIVYFINKDGNLQKQQEWSISLGNHTAQFAEIAAFEFALKKCLPLGGNILVVTDSNYVAKAYNEELDVWASNGFVNNRKKPLKHISKWKSVADLKRLRPDVVVTHEPGHQKLDSSPHAYGNNLADQLATQASFKVHAGKRTADGSEFEKRTADGSEFESPKKKAKVE

SEQ ID NO: 7710 - protein, 2088 aa, synthetic construct
MPAAKRVKLDGGDKKYSIGLDIGTNSVGWAVITDEYKVPSKKFKVLGNTDRHSIKKNLIGALLFDSGETAEATRLKRTARRRYTRRKNRICYLQEIFSNEMAKVDDSFFHRLEESFLVEEDKKHERHPIFGNIVDEVAYHEKYPTIYHLRKKLVDSTDKADLRLIYLALAHMIKFRGHFLIEGDLNPDNSDVDKLFIQLVQTYNQLFEENPINASGVDAKAILSARLSKSRRLENLIAQLPGEKKNGLFGNLIALSLGLTPNFKSNFDLAEDAKLQLSKDTYDDDLDNLLAQIGDQYADLFLAAKNLSDAILLSDILRVNTEITKAPLSASMIKRYDEHHQDLTLLKALVRQQLPEKYKEIFFDQSKNGYAGYIDGGASQEEFYKFIKPILEKMDGTEELLVKLNREDLLRKQRTFDNGSIPHQIHLGELHAILRRQEDFYPFLKDNREKIEKILTFRIPYYVGPLARGNSRFAWMTRKSEETITPWNFEEVVDKGASAQSFIERMTNFDKNLPNEKVLPKHSLLYEYFTVYNELTKVKYVTEGMRKPAFLSGEQKKAIVDLLFKTNRKVTVKQLKEDYFKKIECFDSVEISGVEDRFNASLGTYHDLLKIIKDKDFLDNEENEDILEDIVLTLTLFEDREMIEERLKTYAHLFDDKVMKQLKRRRYTGWGRLSRKLINGIRDKQSGKTILDFLKSDGFANRNFMQLIHDDSLTFKEDIQKAQVSGQGDSLHEHIANLAGSPAIKKGILQTVKVVDELVKVMGRHKPENIVIEMARENQTTQKGQKNSRERMKRIEEGIKELGSQILKEHPVENTQLQNEKLYLYYLQNGRDMYVDQELDINRLSDYDVDHIVPQSFLKDDSIDNKVLTRSDKARGKSDNVPSEEVVKKMKNYWRQLLNAKLITQRKFDNLTKAERGGLSELDKAGFIKRQLVETRQITKHVAQILDSRMNTKYDENDKLIREVKVITLKSKLVSDFRKDFQFYKVREINNYHHAHDAYLNAVVGTALIKKYPKLESEFVYGDYKVYDVRKMIAKSEQEIGKATAKYFFYSNIMNFFKTEITLANGEIRKRPLIETNGETGEIVWDKGRDFATVRKVLSMPQVNIVKKTEVQTGGFSKESILPKRNSDKLIARKKDWDPKKYGGFDSPTVAYSVLVVAKVEKGKSKKLKSVKELLGITIMERSSFEKNPIDFLEAKGYKEVKKDLIIKLPKYSLFELENGRKRMLASAGELQKGNELALPSKYVNFLYLASHYEKLKGSPEDNEQKQLFVEQHKHYLDEIIEQISEFSKRVILADANLDKVLSAYNKHRDKPIREQAENIIHLFTLTNLGAPAAFKYFDTTIDRKRYTSTKEVLDATLIHQSITGLYETRIDLSQLGGDGGGSAGSAAGSGEFGGVPWILKKPLELTIKLDLEEQQGTLLNNSILSKKGKEELKQLFEKYSALWQSWENQVGHRRIRPHKIATGTVKPTPQKQYHINPKAKPDIQIVINDLLKQGVLIQKESTMNTPVYPVPKPNGRWRMVLDYRAVNKVTPLIAVQNQHSYGILGSLFKGRYKTTIDLSNGFWAHPIVPEDYWITAFTWQGKQYCWTVLPQGFLNSPGLFNGDVVDLLQGIPNVEVYVDDVYISHDSEKEHLEYLDILFNRLKEAGYIISLKKSNIANSIVDFLGFQITNEGRGLTDTFKEKLENITAPTTLKQLQSILGLLNFARNFIPDFTELIAPLYALIPKSPKNYVPWQIEHSTTLETLITKLNGAEYLQGRKGDKTLIMKVNASYTTGYIRYYNEGEKKPISYVSIVFSKTELKFTELEKLLTTVHKGLLKALDLSMGQNIHVYSPIVSMQNIQKTPQTAKKALASRWLSWLSYLEDPRIRFFYDPQMPALKDLPAVDTGKDNKKHPSNFQHIFYTDGSAITSPTKEGHLNAGMGIVYFINKDGNLQKQQEWSISLGNHTAQFAEIAAFEFALKKCLPLGGNILVVTDSNYVAKAYNEELDVWASNGFVNNRKKPLKHISKWKSVADLKRLRPDVVVTHEPGHQKLDSSPHAYGNNLADQLATQASFKVHAGKRTADGSEFEKRTADGSEFESPKKKAKVE

SEQ ID NO: 7711 - protein, 2096 aa, synthetic construct
MPAAKRVKLDGGDKKYSIGLDIGTNSVGWAVITDEYKVPSKKFKVLGNTDRHSIKKNLIGALLFDSGETAEATRLKRTARRRYTRRKNRICYLQEIFSNEMAKVDDSFFHRLEESFLVEEDKKHERHPIFGNIVDEVAYHEKYPTIYHLRKKLVDSTDKADLRLIYLALAHMIKFRGHFLIEGDLNPDNSDVDKLFIQLVQTYNQLFEENPINASGVDAKAILSARLSKSRRLENLIAQLPGEKKNGLFGNLIALSLGLTPNFKSNFDLAEDAKLQLSKDTYDDDLDNLLAQIGDQYADLFLAAKNLSDAILLSDILRVNTEITKAPLSASMIKRYDEHHQDLTLLKALVRQQLPEKYKEIFFDQSKNGYAGYIDGGASQEEFYKFIKPILEKMDGTEELLVKLNREDLLRKQRTFDNGSIPHQIHLGELHAILRRQEDFYPFLKDNREKIEKILTFRIPYYVGPLARGNSRFAWMTRKSEETITPWNFEEVVDKGASAQSFIERMTNFDKNLPNEKVLPKHSLLYEYFTVYNELTKVKYVTEGMRKPAFLSGEQKKAIVDLLFKTNRKVTVKQLKEDYFKKIECFDSVEISGVEDRFNASLGTYHDLLKIIKDKDFLDNEENEDILEDIVLTLTLFEDREMIEERLKTYAHLFDDKVMKQLKRRRYTGWGRLSRKLINGIRDKQSGKTILDFLKSDGFANRNFMQLIHDDSLTFKEDIQKAQVSGQGDSLHEHIANLAGSPAIKKGILQTVKVVDELVKVMGRHKPENIVIEMARENQTTQKGQKNSRERMKRIEEGIKELGSQILKEHPVENTQLQNEKLYLYYLQNGRDMYVDQELDINRLSDYDVDHIVPQSFLKDDSIDNKVLTRSDKARGKSDNVPSEEVVKKMKNYWRQLLNAKLITQRKFDNLTKAERGGLSELDKAGFIKRQLVETRQITKHVAQILDSRMNTKYDENDKLIREVKVITLKSKLVSDFRKDFQFYKVREINNYHHAHDAYLNAVVGTALIKKYPKLESEFVYGDYKVYDVRKMIAKSEQEIGKATAKYFFYSNIMNFFKTEITLANGEIRKRPLIETNGETGEIVWDKGRDFATVRKVLSMPQVNIVKKTEVQTGGFSKESILPKRNSDKLIARKKDWDPKKYGGFDSPTVAYSVLVVAKVEKGKSKKLKSVKELLGITIMERSSFEKNPIDFLEAKGYKEVKKDLIIKLPKYSLFELENGRKRMLASAGELQKGNELALPSKYVNFLYLASHYEKLKGSPEDNEQKQLFVEQHKHYLDEIIEQISEFSKRVILADANLDKVLSAYNKHRDKPIREQAENIIHLFTLTNLGAPAAFKYFDTTIDRKRYTSTKEVLDATLIHQSITGLYETRIDLSQLGGDGGGSAGSAAGSGEFGGTLQLEEEYRLFEPESTQKQEMDIWLKNFPQAWAETGGMGTAHCQAPVLIQLKATATPISIRQYPMPHEAYQGIKPHIRRMLDQGILKPCQSPWNTPLLPVKKPGTEDYRPVQDLREVNKRVEDIHPTVPNPYNLLSTLPPSHPWYTVLDLKDAFFCLRLHSESQLLFAFEWRDPEIGLSGQLTWTRLPQGFKNSPTLFNEALHSDLADFRVRYPALVLLQYVDDLLLAAATRTECLEGTKALLETLGNKGYRASAKKAQICLQEVTYLGYSLKDGQRWLTKARKEAILSIPVPKNSRQVREFLGKAGYCRLFIPGFAELAAPLYPLTRPGTLFQWGTEQQLAFEDIKKALLSSPALGLPDITKPFELFIDENSGFAKGVLVQKLGPWKRPVAYLSKKLDTVASGWPPCLRMVAAIAILVKDAGKLTLGQPLTILTSHPVEALVRQPPNKWLSNARMTHYQAMLLDAERVHFGPTVSLNPATLLPLPSGGNHHDCLQILAETHGTRPDLTDQPLPDADLTWYTDGSSFIRNGEREAGAAVTTESEVIWAAPLPPGTSAQRAELIALTQALKMAEGKKLTVYTDSRYAFATTHVHGEIYRRRGWLTSEGKEIKNKNEILALLEALFLPKRLSIIHCPGHQKGDSPQAKGNRLADDTAKKAATETHSSLTVLPAGKRTADGSEFEKRTADGSEFESPKKKAKVE

SEQ ID NO: 7712 - protein, 2095 aa, synthetic construct
MPAAKRVKLDGGDKKYSIGLDIGTNSVGWAVITDEYKVPSKKFKVLGNTDRHSIKKNLIGALLFDSGETAEATRLKRTARRRYTRRKNRICYLQEIFSNEMAKVDDSFFHRLEESFLVEEDKKHERHPIFGNIVDEVAYHEKYPTIYHLRKKLVDSTDKADLRLIYLALAHMIKFRGHFLIEGDLNPDNSDVDKLFIQLVQTYNQLFEENPINASGVDAKAILSARLSKSRRLENLIAQLPGEKKNGLFGNLIALSLGLTPNFKSNFDLAEDAKLQLSKDTYDDDLDNLLAQIGDQYADLFLAAKNLSDAILLSDILRVNTEITKAPLSASMIKRYDEHHQDLTLLKALVRQQLPEKYKEIFFDQSKNGYAGYIDGGASQEEFYKFIKPILEKMDGTEELLVKLNREDLLRKQRTFDNGSIPHQIHLGELHAILRRQEDFYPFLKDNREKIEKILTFRIPYYVGPLARGNSRFAWMTRKSEETITPWNFEEVVDKGASAQSFIERMTNFDKNLPNEKVLPKHSLLYEYFTVYNELTKVKYVTEGMRKPAFLSGEQKKAIVDLLFKTNRKVTVKQLKEDYFKKIECFDSVEISGVEDRFNASLGTYHDLLKIIKDKDFLDNEENEDILEDIVLTLTLFEDREMIEERLKTYAHLFDDKVMKQLKRRRYTGWGRLSRKLINGIRDKQSGKTILDFLKSDGFANRNFMQLIHDDSLTFKEDIQKAQVSGQGDSLHEHIANLAGSPAIKKGILQTVKVVDELVKVMGRHKPENIVIEMARENQTTQKGQKNSRERMKRIEEGIKELGSQILKEHPVENTQLQNEKLYLYYLQNGRDMYVDQELDINRLSDYDVDHIVPQSFLKDDSIDNKVLTRSDKARGKSDNVPSEEVVKKMKNYWRQLLNAKLITQRKFDNLTKAERGGLSELDKAGFIKRQLVETRQITKHVAQILDSRMNTKYDENDKLIREVKVITLKSKLVSDFRKDFQFYKVREINNYHHAHDAYLNAVVGTALIKKYPKLESEFVYGDYKVYDVRKMIAKSEQEIGKATAKYFFYSNIMNFFKTEITLANGEIRKRPLIETNGETGEIVWDKGRDFATVRKVLSMPQVNIVKKTEVQTGGFSKESILPKRNSDKLIARKKDWDPKKYGGFDSPTVAYSVLVVAKVEKGKSKKLKSVKELLGITIMERSSFEKNPIDFLEAKGYKEVKKDLIIKLPKYSLFELENGRKRMLASAGELQKGNELALPSKYVNFLYLASHYEKLKGSPEDNEQKQLFVEQHKHYLDEIIEQISEFSKRVILADANLDKVLSAYNKHRDKPIREQAENIIHLFTLTNLGAPAAFKYFDTTIDRKRYTSTKEVLDATLIHQSITGLYETRIDLSQLGGDGGGSAGSAAGSGEFGGVLNLEEEYRLHEKPVPSSIDPSWLQLFPTVWAERAGMGLANQVPPVVVELRSGASPVAVRQYPMSKEAREGIRPHIQKFLDLGVLVPCRSPWNTPLLPVKKPGTNDYRPVQDLREINKRVQDIHPTVPNPYNLLSSLPPSYTWYSVLDLKDAFFCLRLHPNSQPLFAFEWKDPEKGNTGQLTWTRLPQGFKNSPTLFNEALHRDLAPFRALNPQVVLLQYVDDLLVAAPTYEDCKKGTQKLLQELSKLGYRVSAKKAQLCQREVTYLGYLLKEGKRWLTPARKATVMKIPVPTTPRQVREFLGKAGFCRLFIPGFASLAAPLYPLTKPSIPFIWTEEHQQAFDHIKKALLSAPALALPDLTKPFTLYIDERAGVARGVLTQTLGPWRRPVAYLSKKLDPVASGWPTCLKAVAAVALLLKDADKLTLGQNVTVIASHSLESIVRQPPDRWMTNARMTHYQSLLLNERVSFAPPAVLNPATLLPVESEATPVHRCSEILAEETGTRRDLEDQPLPGVPTWYTDGSSFITEGKRRAGAPIVDGKRTVWASSLPEGTSAQKAELVALTQALRLAEGKNINIYTDSRYAFATAHIHGAIYKQRGWLTSAGKDIKNKEEILALLEAIHLPRRVAIIHCPGHQRGSNPVATGNRRADEAAKQAALSTRVLAGTTKPAGKRTADGSEFEKRTADGSEFESPKKKAKVE

SEQ ID NO: 7713 - protein, 2219 aa, synthetic construct
MPAAKRVKLDGGDKKYSIGLDIGTNSVGWAVITDEYKVPSKKFKVLGNTDRHSIKKNLIGALLFDSGETAEATRLKRTARRRYTRRKNRICYLQEIFSNEMAKVDDSFFHRLEESFLVEEDKKHERHPIFGNIVDEVAYHEKYPTIYHLRKKLVDSTDKADLRLIYLALAHMIKFRGHFLIEGDLNPDNSDVDKLFIQLVQTYNQLFEENPINASGVDAKAILSARLSKSRRLENLIAQLPGEKKNGLFGNLIALSLGLTPNFKSNFDLAEDAKLQLSKDTYDDDLDNLLAQIGDQYADLFLAAKNLSDAILLSDILRVNTEITKAPLSASMIKRYDEHHQDLTLLKALVRQQLPEKYKEIFFDQSKNGYAGYIDGGASQEEFYKFIKPILEKMDGTEELLVKLNREDLLRKQRTFDNGSIPHQIHLGELHAILRRQEDFYPFLKDNREKIEKILTFRIPYYVGPLARGNSRFAWMTRKSEETITPWNFEEVVDKGASAQSFIERMTNFDKNLPNEKVLPKHSLLYEYFTVYNELTKVKYVTEGMRKPAFLSGEQKKAIVDLLFKTNRKVTVKQLKEDYFKKIECFDSVEISGVEDRFNASLGTYHDLLKIIKDKDFLDNEENEDILEDIVLTLTLFEDREMIEERLKTYAHLFDDKVMKQLKRRRYTGWGRLSRKLINGIRDKQSGKTILDFLKSDGFANRNFMQLIHDDSLTFKEDIQKAQVSGQGDSLHEHIANLAGSPAIKKGILQTVKVVDELVKVMGRHKPENIVIEMARENQTTQKGQKNSRERMKRIEEGIKELGSQILKEHPVENTQLQNEKLYLYYLQNGRDMYVDQELDINRLSDYDVDHIVPQSFLKDDSIDNKVLTRSDKARGKSDNVPSEEVVKKMKNYWRQLLNAKLITQRKFDNLTKAERGGLSELDKAGFIKRQLVETRQITKHVAQILDSRMNTKYDENDKLIREVKVITLKSKLVSDFRKDFQFYKVREINNYHHAHDAYLNAVVGTALIKKYPKLESEFVYGDYKVYDVRKMIAKSEQEIGKATAKYFFYSNIMNFFKTEITLANGEIRKRPLIETNGETGEIVWDKGRDFATVRKVLSMPQVNIVKKTEVQTGGFSKESILPKRNSDKLIARKKDWDPKKYGGFDSPTVAYSVLVVAKVEKGKSKKLKSVKELLGITIMERSSFEKNPIDFLEAKGYKEVKKDLIIKLPKYSLFELENGRKRMLASAGELQKGNELALPSKYVNFLYLASHYEKLKGSPEDNEQKQLFVEQHKHYLDEIIEQISEFSKRVILADANLDKVLSAYNKHRDKPIREQAENIIHLFTLTNLGAPAAFKYFDTTIDRKRYTSTKEVLDATLIHQSITGLYETRIDLSQLGGDGGGSAGSAAGSGEFGGTLGDQGSRGSDPLPEPRVTLTVEGIPTEFLVNTGAEHSVLTKPMGKMGSKRTVVAGATGSKVYPWTTKRLLKIGQKQVTHSFLVIPECPAPLLGRDLLTKLKAQIQFSTEGPQVTWEDRPAMCLVLNLEEEYRLHEKPVPPSIDPSWLQLFPMVWAEKAGMGLANQVPPVVVELKSDASPVAVRQYPMSKEAREGIRPHIQRFLDLGILVPCQSPWNTPLLPVKKPGTNDYRPVQDLREVNKRVQDIHPTVPNPYNLLSSLPPSHTWYSVLDLKDAFFCLKLHPNSQPLFAFEWRDPEKGNTGQLTWTRLPQGFKNSPTLFDEALHRDLASFRALNPQVVMLQYVDDLLVAAPTYRDCKEGTRRLLQELSKLGYRVSAKKAQLCREEVTYLGYLLKGGKRWLTPARKATVMKIPTPTTPRQVREFLGTAGFCRLWIPGFASLAAPLYPLTREKVPFTWTEAHQEAFGRIKEALLSAPALALPDLTKPFALYVDEKEGVARGVLTQTLGPWRRPVAYLSKKLDPVASGWPTCLKAIAAVALLLKDADKLTLGQNVLVIAPHNLESIVRQPPDRWMTNARMTHYQSLLLNERVSFAPPAILNPATLLPVESDDTPIHICSEILAEETGTRPDLRDQPLPGVPAWYTDGSSFIMDGRRQAGAAIVDNKRTVWASNLPEGTSAQKAELIALTQALRLAEGKSINIYTDSRYAFATAHVHGAIYKQRGLLTSAGKDIKNKEEILALLEAIHLPKRVAIIHCPGHQRGTDPVATGNRKADEAAKQAAQSTRILTETTKNAGKRTADGSEFEKRTADGSEFESPKKKAKVE

SEQ ID NO: 7714 - protein, 2128 aa, synthetic construct
MPAAKRVKLDGGDKKYSIGLDIGTNSVGWAVITDEYKVPSKKFKVLGNTDRHSIKKNLIGALLFDSGETAEATRLKRTARRRYTRRKNRICYLQEIFSNEMAKVDDSFFHRLEESFLVEEDKKHERHPIFGNIVDEVAYHEKYPTIYHLRKKLVDSTDKADLRLIYLALAHMIKFRGHFLIEGDLNPDNSDVDKLFIQLVQTYNQLFEENPINASGVDAKAILSARLSKSRRLENLIAQLPGEKKNGLFGNLIALSLGLTPNFKSNFDLAEDAKLQLSKDTYDDDLDNLLAQIGDQYADLFLAAKNLSDAILLSDILRVNTEITKAPLSASMIKRYDEHHQDLTLLKALVRQQLPEKYKEIFFDQSKNGYAGYIDGGASQEEFYKFIKPILEKMDGTEELLVKLNREDLLRKQRTFDNGSIPHQIHLGELHAILRRQEDFYPFLKDNREKIEKILTFRIPYYVGPLARGNSRFAWMTRKSEETITPWNFEEVVDKGASAQSFIERMTNFDKNLPNEKVLPKHSLLYEYFTVYNELTKVKYVTEGMRKPAFLSGEQKKAIVDLLFKTNRKVTVKQLKEDYFKKIECFDSVEISGVEDRFNASLGTYHDLLKIIKDKDFLDNEENEDILEDIVLTLTLFEDREMIEERLKTYAHLFDDKVMKQLKRRRYTGWGRLSRKLINGIRDKQSGKTILDFLKSDGFANRNFMQLIHDDSLTFKEDIQKAQVSGQGDSLHEHIANLAGSPAIKKGILQTVKVVDELVKVMGRHKPENIVIEMARENQTTQKGQKNSRERMKRIEEGIKELGSQILKEHPVENTQLQNEKLYLYYLQNGRDMYVDQELDINRLSDYDVDHIVPQSFLKDDSIDNKVLTRSDKARGKSDNVPSEEVVKKMKNYWRQLLNAKLITQRKFDNLTKAERGGLSELDKAGFIKRQLVETRQITKHVAQILDSRMNTKYDENDKLIREVKVITLKSKLVSDFRKDFQFYKVREINNYHHAHDAYLNAVVGTALIKKYPKLESEFVYGDYKVYDVRKMIAKSEQEIGKATAKYFFYSNIMNFFKTEITLANGEIRKRPLIETNGETGEIVWDKGRDFATVRKVLSMPQVNIVKKTEVQTGGFSKESILPKRNSDKLIARKKDWDPKKYGGFDSPTVAYSVLVVAKVEKGKSKKLKSVKELLGITIMERSSFEKNPIDFLEAKGYKEVKKDLIIKLPKYSLFELENGRKRMLASAGELQKGNELALPSKYVNFLYLASHYEKLKGSPEDNEQKQLFVEQHKHYLDEIIEQISEFSKRVILADANLDKVLSAYNKHRDKPIREQAENIIHLFTLTNLGAPAAFKYFDTTIDRKRYTSTKEVLDATLIHQSITGLYETRIDLSQLGGDGGGSAGSAAGSGEFGGLLGRDLLTKLKAQIQFSTEGPQVTWEDRPAMCLVLNLEEEYRLHEKPVPPSIDPSWLQLFPMVWAEKAGMGLANQVPPVVVELKSDASPVAVRQYPMSKEAREGIRPHIQRFLDLGILVPCQSPWNTPLLPVKKPGTNDYRPVQDLREVNKRVQDIHPTVPNPYNLLSSLPPSHTWYSVLDLKDAFFCLKLHPNSQPLFAFEWRDPEKGNTGQLTWTRLPQGFKNSPTLFNEALHRDLASFRALNPQVVMLQYVDDLLVAAPTYRDCKEGTRRLLQELSKLGYRVSAKKAQLCREEVTYLGYLLKGGKRWLTPARKATVMKIPTPTTPRQVREFLGTAGFCRLWIPGFASLAAPLYPLTRPKVPFTWTEAHQEAFGRIKEALLSAPALALPDLTKPFALYVDEKEGVARGVLTQTLGPWRRPVAYLSKKLDPVASGWPTCLKAIAAVALLLKDADKLTLGQNVLVIAPHNLESIVRQPPDRWMTNARMTHYQSLLLNERVSFAPPAILNPATLLPVESDDTPIHICSEILAEETGTRPDLRDQPLPGVPAWYTDGSSFIMDGRRQAGAAIVDNKRTVWASNLPEGTSAQKAELIALTQALRLAEGKSINIYTDSRYAFATAHVHGAIYKQRGWLTSAGKDIKNKEEILALLEAIHLPKRVAIIHCPGHQRGTDPVATGNRKADEAAKQAAQSTRILTETTKNAGKRTADGSEFEKRTADGSEFESPKKKAKVE

SEQ ID NO: 7715 - protein, 2219 aa, synthetic construct
MPAAKRVKLDGGDKKYSIGLDIGTNSVGWAVITDEYKVPSKKFKVLGNTDRHSIKKNLIGALLFDSGETAEATRLKRTARRRYTRRKNRICYLQEIFSNEMAKVDDSFFHRLEESFLVEEDKKHERHPIFGNIVDEVAYHEKYPTIYHLRKKLVDSTDKADLRLIYLALAHMIKFRGHFLIEGDLNPDNSDVDKLFIQLVQTYNQLFEENPINASGVDAKAILSARLSKSRRLENLIAQLPGEKKNGLFGNLIALSLGLTPNFKSNFDLAEDAKLQLSKDTYDDDLDNLLAQIGDQYADLFLAAKNLSDAILLSDILRVNTEITKAPLSASMIKRYDEHHQDLTLLKALVRQQLPEKYKEIFFDQSKNGYAGYIDGGASQEEFYKFIKPILEKMDGTEELLVKLNREDLLRKQRTFDNGSIPHQIHLGELHAILRRQEDFYPFLKDNREKIEKILTFRIPYYVGPLARGNSRFAWMTRKSEETITPWNFEEVVDKGASAQSFIERMTNFDKNLPNEKVLPKHSLLYEYFTVYNELTKVKYVTEGMRKPAFLSGEQKKAIVDLLFKTNRKVTVKQLKEDYFKKIECFDSVEISGVEDRFNASLGTYHDLLKIIKDKDFLDNEENEDILEDIVLTLTLFEDREMIEERLKTYAHLFDDKVMKQLKRRRYTGWGRLSRKLINGIRDKQSGKTILDFLKSDGFANRNFMQLIHDDSLTFKEDIQKAQVSGQGDSLHEHIANLAGSPAIKKGILQTVKVVDELVKVMGRHKPENIVIEMARENQTTQKGQKNSRERMKRIEEGIKELGSQILKEHPVENTQLQNEKLYLYYLQNGRDMYVDQELDINRLSDYDVDHIVPQSFLKDDSIDNKVLTRSDKARGKSDNVPSEEVVKKMKNYWRQLLNAKLITQRKFDNLTKAERGGLSELDKAGFIKRQLVETRQITKHVAQILDSRMNTKYDENDKLIREVKVITLKSKLVSDFRKDFQFYKVREINNYHHAHDAYLNAVVGTALIKKYPKLESEFVYGDYKVYDVRKMIAKSEQEIGKATAKYFFYSNIMNFFKTEITLANGEIRKRPLIETNGETGEIVWDKGRDFATVRKVLSMPQVNIVKKTEVQTGGFSKESILPKRNSDKLIARKKDWDPKKYGGFDSPTVAYSVLVVAKVEKGKSKKLKSVKELLGITIMERSSFEKNPIDFLEAKGYKEVKKDLIIKLPKYSLFELENGRKRMLASAGELQKGNELALPSKYVNFLYLASHYEKLKGSPEDNEQKQLFVEQHKHYLDEIIEQISEFSKRVILADANLDKVLSAYNKHRDKPIREQAENIIHLFTLTNLGAPAAFKYFDTTIDRKRYTSTKEVLDATLIHQSITGLYETRIDLSQLGGDGGGSAGSAAGSGEFGGTLGDQGSRGSDPLPEPRVTLTVEGIPTEFLVNTGAEHSVLTKPMGKMGSKRTVVAGATGSKVYPWTTKRLLKIGQKQVTHSFLVIPECPAPLLGRDLLTKLKAQIQFSTEGPQVTWEDRPAMCLVLNLEEEYRLHEKPVPPSIDPSWLQLFPMVWAEKAGMGLANQVPPVVVELKSDASPVAVRQYPMSKEAREGIRPHIQRFLDLGILVPCQSPWNTPLLPVKKPGTNDYRPVQDLREVNKRVQDIHPTVPNPYNLLSSLPPSHTWYSVLDLKDAFFCLKLHPNSQPLFAFEWRDPEKGNTGQLTWTRLPQGFKNSPTLFNEALHRDLASFRALNPQVVMLQYVDDLLVAAPTYRDCKEGTRRLLQELSKLGYRVSAKKAQLCREEVTYLGYLLKGGKRWLTPARKATVMKIPTPTTPRQVREFLGTAGFCRLWIPGFASLAAPLYPLTRPKVPFTWTEAHQEAFGRIKEALLSAPALALPDLTKPFALYVDEKEGVARGVLTQTLGPWRRPVAYLSKKLDPVASGWPTCLKAIAAVALLLKDADKLTLGQNVLVIAPHNLESIVRQPPDRWMTNARMTHYQSLLLNERVSFAPPAILNPATLLPVESDDTPIHICSEILAEETGTRPDLRDQPLPGVPAWYTDGSSFIMDGRRQAGAAIVDNKRTVWASNLPEGTSAQKAELIALTQALRLAEGKSINIYTDSRYAFATAHVHGAIYKQRGWLTSAGKDIKNKEEILALLEAIHLPKRVAIIHCPGHQRGTDPVATGNRKADEAAKQAAQSTRILTETTKNAGKRTADGSEFEKRTADGSEFESPKKKAKVE

SEQ ID NO: 7716 - protein, 2097 aa, synthetic construct
MPAAKRVKLDGGDKKYSIGLDIGTNSVGWAVITDEYKVPSKKFKVLGNTDRHSIKKNLIGALLFDSGETAEATRLKRTARRRYTRRKNRICYLQEIFSNEMAKVDDSFFHRLEESFLVEEDKKHERHPIFGNIVDEVAYHEKYPTIYHLRKKLVDSTDKADLRLIYLALAHMIKFRGHFLIEGDLNPDNSDVDKLFIQLVQTYNQLFEENPINASGVDAKAILSARLSKSRRLENLIAQLPGEKKNGLFGNLIALSLGLTPNFKSNFDLAEDAKLQLSKDTYDDDLDNLLAQIGDQYADLFLAAKNLSDAILLSDILRVNTEITKAPLSASMIKRYDEHHQDLTLLKALVRQQLPEKYKEIFFDQSKNGYAGYIDGGASQEEFYKFIKPILEKMDGTEELLVKLNREDLLRKQRTFDNGSIPHQIHLGELHAILRRQEDFYPFLKDNREKIEKILTFRIPYYVGPLARGNSRFAWMTRKSEETITPWNFEEVVDKGASAQSFIERMTNFDKNLPNEKVLPKHSLLYEYFTVYNELTKVKYVTEGMRKPAFLSGEQKKAIVDLLFKTNRKVTVKQLKEDYFKKIECFDSVEISGVEDRFNASLGTYHDLLKIIKDKDFLDNEENEDILEDIVLTLTLFEDREMIEERLKTYAHLFDDKVMKQLKRRRYTGWGRLSRKLINGIRDKQSGKTILDFLKSDGFANRNFMQLIHDDSLTFKEDIQKAQVSGQGDSLHEHIANLAGSPAIKKGILQTVKVVDELVKVMGRHKPENIVIEMARENQTTQKGQKNSRERMKRIEEGIKELGSQILKEHPVENTQLQNEKLYLYYLQNGRDMYVDQELDINRLSDYDVDHIVPQSFLKDDSIDNKVLTRSDKARGKSDNVPSEEVVKKMKNYWRQLLNAKLITQRKFDNLTKAERGGLSELDKAGFIKRQLVETRQITKHVAQILDSRMNTKYDENDKLIREVKVITLKSKLVSDFRKDFQFYKVREINNYHHAHDAYLNAVVGTALIKKYPKLESEFVYGDYKVYDVRKMIAKSEQEIGKATAKYFFYSNIMNFFKTEITLANGEIRKRPLIETNGETGEIVWDKGRDFATVRKVLSMPQVNIVKKTEVQTGGFSKESILPKRNSDKLIARKKDWDPKKYGGFDSPTVAYSVLVVAKVEKGKSKKLKSVKELLGITIMERSSFEKNPIDFLEAKGYKEVKKDLIIKLPKYSLFELENGRKRMLASAGELQKGNELALPSKYVNFLYLASHYEKLKGSPEDNEQKQLFVEQHKHYLDEIIEQISEFSKRVILADANLDKVLSAYNKHRDKPIREQAENIIHLFTLTNLGAPAAFKYFDTTIDRKRYTSTKEVLDATLIHQSITGLYETRIDLSQLGGDGGGSAGSAAGSGEFGGTLNLEDEYRLYETSAEPEVSPGSTWLSDFPQAWAETGGMGLAVRQAPLIIPLKATSTPVSIKQYPMSQEAKLGIKPHIQRLLDQGILVPCQSPWNTPLLPVKKPGTNDYRPVQDLREVNKRVEDIHPTVPNPYNLLSGLPPSHRWYTVLDLKDAFFCLRLHPTSQPLFAFEWRDPGMGISGQLTWTRLPQGFKNSPTLFNEALHRDLADFRIQHPDLILLQYVDDILLAATSELDCQQGTRALLLTLGNLGYRASAKKAQLCQKQVKYLGYLLKEGQRWLTEARKETVMGQPTPKTPRQLREFLGTAGFCRLWIPGFAEMAAPLYPLTKPGTLFNWGPDQQKAYQEIKQALLTAPALGLPDLTKPFELFVDEKQGYAKGVLTQKLGPWRRPVAYLSKKLDPVAAGWPPCLRMVAAIAVLRKDAGKLTMGQPLVILAPHAVEALVKQPPDRWLSNARMTHYQAMLLDTDRVQFGPVVALNPATLLPLPEEGAPHDCLEILAETHGTRPDLTDQPIPDADHTWYTDGSSFLQEGQRKAGAAVTTETEVIWARALPAGTSAQRAELIALTQALKMAEGKRLNVYTDSRYAFATAHIHGEIYRRRGWLTSEGREIKNKSEILALLKALFLPKRLSIIHCLGHQKGDSAEARGNRLADQAAREAAIKTPPDTSTLLAGKRTADGSEFEKRTADGSEFESPKKKAKVE

SEQ ID NO: 7717 - protein, 2097 aa, synthetic construct
MPAAKRVKLDGGDKKYSIGLDIGTNSVGWAVITDEYKVPSKKFKVLGNTDRHSIKKNLIGALLFDSGETAEATRLKRTARRRYTRRKNRICYLQEIFSNEMAKVDDSFFHRLEESFLVEEDKKHERHPIFGNIVDEVAYHEKYPTIYHLRKKLVDSTDKADLRLIYLALAHMIKFRGHFLIEGDLNPDNSDVDKLFIQLVQTYNQLFEENPINASGVDAKAILSARLSKSRRLENLIAQLPGEKKNGLFGNLIALSLGLTPNFKSNFDLAEDAKLQLSKDTYDDDLDNLLAQIGDQYADLFLAAKNLSDAILLSDILRVNTEITKAPLSASMIKRYDEHHQDLTLLKALVRQQLPEKYKEIFFDQSKNGYAGYIDGGASQEEFYKFIKPILEKMDGTEELLVKLNREDLLRKQRTFDNGSIPHQIHLGELHAILRRQEDFYPFLKDNREKIEKILTFRIPYYVGPLARGNSRFAWMTRKSEETITPWNFEEVVDKGASAQSFIERMTNFDKNLPNEKVLPKHSLLYEYFTVYNELTKVKYVTEGMRKPAFLSGEQKKAIVDLLFKTNRKVTVKQLKEDYFKKIECFDSVEISGVEDRFNASLGTYHDLLKIIKDKDFLDNEENEDILEDIVLTLTLFEDREMIEERLKTYAHLFDDKVMKQLKRRRYTGWGRLSRKLINGIRDKQSGKTILDFLKSDGFANRNFMQLIHDDSLTFKEDIQKAQVSGQGDSLHEHIANLAGSPAIKKGILQTVKVVDELVKVMGRHKPENIVIEMARENQTTQKGQKNSRERMKRIEEGIKELGSQILKEHPVENTQLQNEKLYLYYLQNGRDMYVDQELDINRLSDYDVDHIVPQSFLKDDSIDNKVLTRSDKARGKSDNVPSEEVVKKMKNYWRQLLNAKLITQRKFDNLTKAERGGLSELDKAGFIKRQLVETRQITKHVAQILDSRMNTKYDENDKLIREVKVITLKSKLVSDFRKDFQFYKVREINNYHHAHDAYLNAVVGTALIKKYPKLESEFVYGDYKVYDVRKMIAKSEQEIGKATAKYFFYSNIMNFFKTEITLANGEIRKRPLIETNGETGEIVWDKGRDFATVRKVLSMPQVNIVKKTEVQTGGFSKESILPKRNSDKLIARKKDWDPKKYGGFDSPTVAYSVLVVAKVEKGKSKKLKSVKELLGITIMERSSFEKNPIDFLEAKGYKEVKKDLIIKLPKYSLFELENGRKRMLASAGELQKGNELALPSKYVNFLYLASHYEKLKGSPEDNEQKQLFVEQHKHYLDEIIEQISEFSKRVILADANLDKVLSAYNKHRDKPIREQAENIIHLFTLTNLGAPAAFKYFDTTIDRKRYTSTKEVLDATLIHQSITGLYETRIDLSQLGGDGGGSAGSAAGSGEFGGTLNIEDEHRLHETSKEPDVSLGSTWLSDFPQAWAETGGMGLAVRQAPLIIPLKATSTPVSIKQYPMSQEARLGIKPHIQRLLDQGILVPCQSPWNTPLLPVKKPGTNDYRPVQDLREVNKRVEDIHPTVPNPYNLLSGLPPSHQWYTVLDLKDAFFCLRLHPTSQPLFAFEWRDPEMGISGQLTWTRLPQGFKNSPTLFDEALHRDLADFRIQHPDLILLQYVDDLLLAATSELDCQQGTRALLQTLGNLGYRASAKKAQICQKQVKYLGYLLKEGQRWLTEARKETVMGQPTPKTPRQLREFLGTAGFCRLWIPGFAEMAAPLYPLTKTGTLFNWGPDQQKAYQEIKQALLTAPALGLPDLTKPFELFVDEKQGYAKGVLTQKLGPWRRPVAYLSKKLDPVAAGWPPCLRMVAAIAVLTKDAGKLTMGQPLVILAPHAVEALVKQPPDRWLSNARMTHYQALLLDTDRVQFGPVVALNPATLLPLPEEGLQHNCLDILAEAHGTRPDLTDQPLPDADHTWYTDGSSLLQEGQRKAGAAVTTETEVIWAKALPAGTSAQRAELIALTQALKMAEGKKLNVYTDSRYAFATAHIHGEIYRRRGLLTSEGKEIKNKDEILALLKALFLPKRLSIIHCPGHQKGHSAEARGNRMADQAARKAAITETPDTSTLLAGKRTADGSEFEKRTADGSEFESPKKKAKVE

SEQ ID NO: 7718 - protein, 2177 aa, synthetic construct
MPAAKRVKLDGGDKKYSIGLDIGTNSVGWAVITDEYKVPSKKFKVLGNTDRHSIKKNLIGALLFDSGETAEATRLKRTARRRYTRRKNRICYLQEIFSNEMAKVDDSFFHRLEESFLVEEDKKHERHPIFGNIVDEVAYHEKYPTIYHLRKKLVDSTDKADLRLIYLALAHMIKFRGHFLIEGDLNPDNSDVDKLFIQLVQTYNQLFEENPINASGVDAKAILSARLSKSRRLENLIAQLPGEKKNGLFGNLIALSLGLTPNFKSNFDLAEDAKLQLSKDTYDDDLDNLLAQIGDQYADLFLAAKNLSDAILLSDILRVNTEITKAPLSASMIKRYDEHHQDLTLLKALVRQQLPEKYKEIFFDQSKNGYAGYIDGGASQEEFYKFIKPILEKMDGTEELLVKLNREDLLRKQRTFDNGSIPHQIHLGELHAILRRQEDFYPFLKDNREKIEKILTFRIPYYVGPLARGNSRFAWMTRKSEETITPWNFEEVVDKGASAQSFIERMTNFDKNLPNEKVLPKHSLLYEYFTVYNELTKVKYVTEGMRKPAFLSGEQKKAIVDLLFKTNRKVTVKQLKEDYFKKIECFDSVEISGVEDRFNASLGTYHDLLKIIKDKDFLDNEENEDILEDIVLTLTLFEDREMIEERLKTYAHLFDDKVMKQLKRRRYTGWGRLSRKLINGIRDKQSGKTILDFLKSDGFANRNFMQLIHDDSLTFKEDIQKAQVSGQGDSLHEHIANLAGSPAIKKGILQTVKVVDELVKVMGRHKPENIVIEMARENQTTQKGQKNSRERMKRIEEGIKELGSQILKEHPVENTQLQNEKLYLYYLQNGRDMYVDQELDINRLSDYDVDHIVPQSFLKDDSIDNKVLTRSDKARGKSDNVPSEEVVKKMKNYWRQLLNAKLITQRKFDNLTKAERGGLSELDKAGFIKRQLVETRQITKHVAQILDSRMNTKYDENDKLIREVKVITLKSKLVSDFRKDFQFYKVREINNYHHAHDAYLNAVVGTALIKKYPKLESEFVYGDYKVYDVRKMIAKSEQEIGKATAKYFFYSNIMNFFKTEITLANGEIRKRPLIETNGETGEIVWDKGRDFATVRKVLSMPQVNIVKKTEVQTGGFSKESILPKRNSDKLIARKKDWDPKKYGGFDSPTVAYSVLVVAKVEKGKSKKLKSVKELLGITIMERSSFEKNPIDFLEAKGYKEVKKDLIIKLPKYSLFELENGRKRMLASAGELQKGNELALPSKYVNFLYLASHYEKLKGSPEDNEQKQLFVEQHKHYLDEIIEQISEFSKRVILADANLDKVLSAYNKHRDKPIREQAENIIHLFTLTNLGAPAAFKYFDTTIDRKRYTSTKEVLDATLIHQSITGLYETRIDLSQLGGDGGGSAGSAAGSGEFGGMDPLQLLQPLEAEIKGTKLKAHWNSGATITCVPQAFLEEEVPIKNIWIKTIHGEKEQPVYYLTFKIQGRKVEAEVISSPYDYILVSPSDIPWLMKKPLQLTTLVPLQEYEERLLKQTMLTGSYKEKLQSLFLKYDALWQHWENQVGHRRIKPHHIATGTVNPRPQKQYPINPKAKASIQTVINDLLKQGVLIQQNSIMNTPVYPVPKPDGKWRMVLDYREVNKTIPLIAAQNQHSAGILSSIFRGKYKTTLDLSNGFWAHSITPESYWLTAFTWLGQQYCWTRLPQGFLNSPALFNADVVDLLKEVPNVQVYVDDIYISHDDPREHLEQLEKVFSLLLNAGYVVSLKKSEIAQHEVEFLGFNITKEGRGLTETFKQKLLNITPPRDLKQLQSILGLLNFARNFIPNFSELVKPLYNIIATAPGKYITWTTDNSQQLQNIISMLNSAENLEERNPEVRLIMKVNTSPSAGYIRFYNEFAKRPIMYLNYVYTKAEVKFTNTEKLLTTIHKGLIKALDLGMGQEILVYSPIVSMTKIQKTPLPERKALPIRWITWMSYLEDPRIQFHYDKTLPELQQVPTVTDDIIAKIKHPSEFSMVFYTDGSAIKHPNVNKSHNAGMGIAQVQFKPEFTVINTWSIPLGDHTAQLAEVAAVEFACKKALKIDGPVLIVTDSFYVAESVNKELPYWQSNGFFNNKKKPLKHVSKWKSIADCIQLKPDIIIIHEKGHQPTASTFHTEGNNLADKLATQGSYVVNAGKRTADGSEFEKRTADGSEFESPKKKAKVE

SEQ ID NO: 7719 - protein, 2097 aa, synthetic construct
MPAAKRVKLDGGDKKYSIGLDIGTNSVGWAVITDEYKVPSKKFKVLGNTDRHSIKKNLIGALLFDSGETAEATRLKRTARRRYTRRKNRICYLQEIFSNEMAKVDDSFFHRLEESFLVEEDKKHERHPIFGNIVDEVAYHEKYPTIYHLRKKLVDSTDKADLRLIYLALAHMIKFRGHFLIEGDLNPDNSDVDKLFIQLVQTYNQLFEENPINASGVDAKAILSARLSKSRRLENLIAQLPGEKKNGLFGNLIALSLGLTPNFKSNFDLAEDAKLQLSKDTYDDDLDNLLAQIGDQYADLFLAAKNLSDAILLSDILRVNTEITKAPLSASMIKRYDEHHQDLTLLKALVRQQLPEKYKEIFFDQSKNGYAGYIDGGASQEEFYKFIKPILEKMDGTEELLVKLNREDLLRKQRTFDNGSIPHQIHLGELHAILRRQEDFYPFLKDNREKIEKILTFRIPYYVGPLARGNSRFAWMTRKSEETITPWNFEEVVDKGASAQSFIERMTNFDKNLPNEKVLPKHSLLYEYFTVYNELTKVKYVTEGMRKPAFLSGEQKKAIVDLLFKTNRKVTVKQLKEDYFKKIECFDSVEISGVEDRFNASLGTYHDLLKIIKDKDFLDNEENEDILEDIVLTLTLFEDREMIEERLKTYAHLFDDKVMKQLKRRRYTGWGRLSRKLINGIRDKQSGKTILDFLKSDGFANRNFMQLIHDDSLTFKEDIQKAQVSGQGDSLHEHIANLAGSPAIKKGILQTVKVVDELVKVMGRHKPENIVIEMARENQTTQKGQKNSRERMKRIEEGIKELGSQILKEHPVENTQLQNEKLYLYYLQNGRDMYVDQELDINRLSDYDVDHIVPQSFLKDDSIDNKVLTRSDKARGKSDNVPSEEVVKKMKNYWRQLLNAKLITQRKFDNLTKAERGGLSELDKAGFIKRQLVETRQITKHVAQILDSRMNTKYDENDKLIREVKVITLKSKLVSDFRKDFQFYKVREINNYHHAHDAYLNAVVGTALIKKYPKLESEFVYGDYKVYDVRKMIAKSEQEIGKATAKYFFYSNIMNFFKTEITLANGEIRKRPLIETNGETGEIVWDKGRDFATVRKVLSMPQVNIVKKTEVQTGGFSKESILPKRNSDKLIARKKDWDPKKYGGFDSPTVAYSVLVVAKVEKGKSKKLKSVKELLGITIMERSSFEKNPIDFLEAKGYKEVKKDLIIKLPKYSLFELENGRKRMLASAGELQKGNELALPSKYVNFLYLASHYEKLKGSPEDNEQKQLFVEQHKHYLDEIIEQISEFSKRVILADANLDKVLSAYNKHRDKPIREQAENIIHLFTLTNLGAPAAFKYFDTTIDRKRYTSTKEVLDATLIHQSITGLYETRIDLSQLGGDGGGSAGSAAGSGEFGGTLNIEDEYRLHETSKEPDVPLGSTWLSDFPQAWAETGGMGLAVRQAPLIIPLKATSTPVSIKQYPMSQEARLGIKPHIQRLLDQGILVPCQSPWNTPLLPVKKPGTNDYRPVQDLREVNKRVEDIHPTVPNPYNLLSGLPPSHQWYTVLDLKDAFFCLRLHPTSQPLFAFEWRDPEMGISGQLTWTRLPQGFKNSPTLFNEALHRDLADFRIQHPDLILLQYVDDLLLAATSEQDCQRGTRALLQTLGNLGYRASAKKAQICQKQVKYLGYLLKEGQRWLTEARKETVMGQPTPKTPRQLREFLGTAGFCRLWIPGFAEMAAPLYPLTKPGTLFNWGPDQQKAYQEIKQALLTAPALGLPDLTKPFELFVDEKQGYAKGVLTQKLGPWRRPVAYLSKKLDPVAAGWPPCLRMVAAIAVLTKDAGKLTMGQPLVILAPHAVEALVKQPPDRWLSNARMTHYQAMLLDTDRVQFGPVVALNPATLLPLPEKEAPHDCLEILAETHGTRPDLTDQPIPDADYTWYTDGSSFLQEGQRRAGAAVTTETEVIWARALPAGTSAQRAELIALTQALKMAEGKKLNVYTDSRYAFATAHVHGEIYRRRGWLTSEGREIKNKNEILALLKALFLPKRLSIIHCPGHQKGNSAEARGNRMADQAAREAAMKAVLETSTLLAGKRTADGSEFEKRTADGSEFESPKKKAKVE

SEQ ID NO: 7720 - protein, 2120 aa, synthetic construct
MPAAKRVKLDGGDKKYSIGLDIGTNSVGWAVITDEYKVPSKKFKVLGNTDRHSIKKNLIGALLFDSGETAEATRLKRTARRRYTRRKNRICYLQEIFSNEMAKVDDSFFHRLEESFLVEEDKKHERHPIFGNIVDEVAYHEKYPTIYHLRKKLVDSTDKADLRLIYLALAHMIKFRGHFLIEGDLNPDNSDVDKLFIQLVQTYNQLFEENPINASGVDAKAILSARLSKSRRLENLIAQLPGEKKNGLFGNLIALSLGLTPNFKSNFDLAEDAKLQLSKDTYDDDLDNLLAQIGDQYADLFLAAKNLSDAILLSDILRVNTEITKAPLSASMIKRYDEHHQDLTLLKALVRQQLPEKYKEIFFDQSKNGYAGYIDGGASQEEFYKFIKPILEKMDGTEELLVKLNREDLLRKQRTFDNGSIPHQIHLGELHAILRRQEDFYPFLKDNREKIEKILTFRIPYYVGPLARGNSRFAWMTRKSEETITPWNFEEVVDKGASAQSFIERMTNFDKNLPNEKVLPKHSLLYEYFTVYNELTKVKYVTEGMRKPAFLSGEQKKAIVDLLFKTNRKVTVKQLKEDYFKKIECFDSVEISGVEDRFNASLGTYHDLLKIIKDKDFLDNEENEDILEDIVLTLTLFEDREMIEERLKTYAHLFDDKVMKQLKRRRYTGWGRLSRKLINGIRDKQSGKTILDFLKSDGFANRNFMQLIHDDSLTFKEDIQKAQVSGQGDSLHEHIANLAGSPAIKKGILQTVKVVDELVKVMGRHKPENIVIEMARENQTTQKGQKNSRERMKRIEEGIKELGSQILKEHPVENTQLQNEKLYLYYLQNGRDMYVDQELDINRLSDYDVDHIVPQSFLKDDSIDNKVLTRSDKARGKSDNVPSEEVVKKMKNYWRQLLNAKLITQRKFDNLTKAERGGLSELDKAGFIKRQLVETRQITKHVAQILDSRMNTKYDENDKLIREVKVITLKSKLVSDFRKDFQFYKVREINNYHHAHDAYLNAVVGTALIKKYPKLESEFVYGDYKVYDVRKMIAKSEQEIGKATAKYFFYSNIMNFFKTEITLANGEIRKRPLIETNGETGEIVWDKGRDFATVRKVLSMPQVNIVKKTEVQTGGFSKESILPKRNSDKLIARKKDWDPKKYGGFDSPTVAYSVLVVAKVEKGKSKKLKSVKELLGITIMERSSFEKNPIDFLEAKGYKEVKKDLIIKLPKYSLFELENGRKRMLASAGELQKGNELALPSKYVNFLYLASHYEKLKGSPEDNEQKQLFVEQHKHYLDEIIEQISEFSKRVILADANLDKVLSAYNKHRDKPIREQAENIIHLFTLTNLGAPAAFKYFDTTIDRKRYTSTKEVLDATLIHQSITGLYETRIDLSQLGGDGGSGGSSGGSSGSETPGTSESATPESSGGSSGGSSGGTAPLEEEYRLFLEAPIQNVTLLEQWKREIPKVWAEINPPGLASTQAPIHVQLLSTALPVRVRQYPITLEAKRSLRETIRKFRAAGILRPVHSPWNTPLLPVRKSGTSEYRMVQDLREVNKRVETIHPTVPNPYTLLSLLPPDRIWYSVLDLKDAFFCIPLAPESQLIFAFEWADAEEGESGQLTWTRLPQGFKNSPTLFDEALNRDLQGFRLDHPSVSLLQYVDDLLIAADTQAACLSATRDLLMTLAELGYRVSGKKAQLCQEEVTYLGFKIHKGSRSLSNSRTQAILQIPVPKTKRQVREFLGTIGYCRLWIPGFAELAQPLYAATRGGNDPLVWGEKEEEAFQSLKLALTQPPALALPSLDKPFQLFVEETSGAAKGVLTQALGPWKRPVAYLSKRLDPVAAGWPRCLRAIAAAALLTREASKLTFGQDIEITSSHNLESLLRSPPDKWLTNARITQYQVLLLDPPRVRFKQTAALNPATLLPETDDTLPIHHCLDTLDSLTSTRPDLTDQPLAQAEATLFTDGSSYIRDGKRYAGAAVVTLDSVIWAEPLPIGTSAQKAELIALTKALEWSKDKSVNIYTDSRYAFATLHVHGMIYRERGLLTAGGKAIKNAPEILALLTAVWLPKRVAVMHCKGHQKDDAPTSTGNRRADEVAREVAIRPLSTQATISAGKRTADGSEFEKRTADGSEFESPKKKAKVE

SEQ ID NO: 7721 - protein, 2120 aa, synthetic construct
MPAAKRVKLDGGDKKYSIGLDIGTNSVGWAVITDEYKVPSKKFKVLGNTDRHSIKKNLIGALLFDSGETAEATRLKRTARRRYTRRKNRICYLQEIFSNEMAKVDDSFFHRLEESFLVEEDKKHERHPIFGNIVDEVAYHEKYPTIYHLRKKLVDSTDKADLRLIYLALAHMIKFRGHFLIEGDLNPDNSDVDKLFIQLVQTYNQLFEENPINASGVDAKAILSARLSKSRRLENLIAQLPGEKKNGLFGNLIALSLGLTPNFKSNFDLAEDAKLQLSKDTYDDDLDNLLAQIGDQYADLFLAAKNLSDAILLSDILRVNTEITKAPLSASMIKRYDEHHQDLTLLKALVRQQLPEKYKEIFFDQSKNGYAGYIDGGASQEEFYKFIKPILEKMDGTEELLVKLNREDLLRKQRTFDNGSIPHQIHLGELHAILRRQEDFYPFLKDNREKIEKILTFRIPYYVGPLARGNSRFAWMTRKSEETITPWNFEEVVDKGASAQSFIERMTNFDKNLPNEKVLPKHSLLYEYFTVYNELTKVKYVTEGMRKPAFLSGEQKKAIVDLLFKTNRKVTVKQLKEDYFKKIECFDSVEISGVEDRFNASLGTYHDLLKIIKDKDFLDNEENEDILEDIVLTLTLFEDREMIEERLKTYAHLFDDKVMKQLKRRRYTGWGRLSRKLINGIRDKQSGKTILDFLKSDGFANRNFMQLIHDDSLTFKEDIQKAQVSGQGDSLHEHIANLAGSPAIKKGILQTVKVVDELVKVMGRHKPENIVIEMARENQTTQKGQKNSRERMKRIEEGIKELGSQILKEHPVENTQLQNEKLYLYYLQNGRDMYVDQELDINRLSDYDVDHIVPQSFLKDDSIDNKVLTRSDKARGKSDNVPSEEVVKKMKNYWRQLLNAKLITQRKFDNLTKAERGGLSELDKAGFIKRQLVETRQITKHVAQILDSRMNTKYDENDKLIREVKVITLKSKLVSDFRKDFQFYKVREINNYHHAHDAYLNAVVGTALIKKYPKLESEFVYGDYKVYDVRKMIAKSEQEIGKATAKYFFYSNIMNFFKTEITLANGEIRKRPLIETNGETGEIVWDKGRDFATVRKVLSMPQVNIVKKTEVQTGGFSKESILPKRNSDKLIARKKDWDPKKYGGFDSPTVAYSVLVVAKVEKGKSKKLKSVKELLGITIMERSSFEKNPIDFLEAKGYKEVKKDLIIKLPKYSLFELENGRKRMLASAGELQKGNELALPSKYVNFLYLASHYEKLKGSPEDNEQKQLFVEQHKHYLDEIIEQISEFSKRVILADANLDKVLSAYNKHRDKPIREQAENIIHLFTLTNLGAPAAFKYFDTTIDRKRYTSTKEVLDATLIHQSITGLYETRIDLSQLGGDGGSGGSSGGSSGSETPGTSESATPESSGGSSGGSSGGTAPLEEEYRLFLEAPIQNVTLLEQWKREIPKVWAEINPPGLASTQAPIHVQLLSTALPVRVRQYPITLEAKRSLRETIRKFRAAGILRPVHSPWNTPLLPVRKSGTSEYRMVQDLREVNKRVETIHPTVPNPYTLLSLLPPDRIWYSVLDLKDAFFCIPLAPESQLIFAFEWADAEEGESGQLTWTRLPQGFKNSPTLFNEALNRDLQGFRLDHPSVSLLQYVDDLLIAADTQAACLSATRDLLMTLAELGYRVSGKKAQLCQEEVTYLGFKIHKGSRSLSNSRTQAILQIPVPKTKRQVREFLGTIGYCRLWIPGFAELAQPLYAATRPGNDPLVWGEKEEEAFQSLKLALTQPPALALPSLDKPFQLFVEETSGAAKGVLTQALGPWKRPVAYLSKRLDPVAAGWPRCLRAIAAAALLTREASKLTFGQDIEITSSHNLESLLRSPPDKWLTNARITQYQVLLLDPPRVRFKQTAALNPATLLPETDDTLPIHHCLDTLDSLTSTRPDLTDQPLAQAEATLFTDGSSYIRDGKRYAGAAVVTLDSVIWAEPLPIGTSAQKAELIALTKALEWSKDKSVNIYTDSRYAFATLHVHGMIYRERGWLTAGGKAIKNAPEILALLTAVWLPKRVAVMHCKGHQKDDAPTSTGNRRADEVAREVAIRPLSTQATISAGKRTADGSEFEKRTADGSEFESPKKKAKVE

SEQ ID NO: 7722 - protein, 2124 aa, synthetic construct
MPAAKRVKLDGGDKKYSIGLDIGTNSVGWAVITDEYKVPSKKFKVLGNTDRHSIKKNLIGALLFDSGETAEATRLKRTARRRYTRRKNRICYLQEIFSNEMAKVDDSFFHRLEESFLVEEDKKHERHPIFGNIVDEVAYHEKYPTIYHLRKKLVDSTDKADLRLIYLALAHMIKFRGHFLIEGDLNPDNSDVDKLFIQLVQTYNQLFEENPINASGVDAKAILSARLSKSRRLENLIAQLPGEKKNGLFGNLIALSLGLTPNFKSNFDLAEDAKLQLSKDTYDDDLDNLLAQIGDQYADLFLAAKNLSDAILLSDILRVNTEITKAPLSASMIKRYDEHHQDLTLLKALVRQQLPEKYKEIFFDQSKNGYAGYIDGGASQEEFYKFIKPILEKMDGTEELLVKLNREDLLRKQRTFDNGSIPHQIHLGELHAILRRQEDFYPFLKDNREKIEKILTFRIPYYVGPLARGNSRFAWMTRKSEETITPWNFEEVVDKGASAQSFIERMTNFDKNLPNEKVLPKHSLLYEYFTVYNELTKVKYVTEGMRKPAFLSGEQKKAIVDLLFKTNRKVTVKQLKEDYFKKIECFDSVEISGVEDRFNASLGTYHDLLKIIKDKDFLDNEENEDILEDIVLTLTLFEDREMIEERLKTYAHLFDDKVMKQLKRRRYTGWGRLSRKLINGIRDKQSGKTILDFLKSDGFANRNFMQLIHDDSLTFKEDIQKAQVSGQGDSLHEHIANLAGSPAIKKGILQTVKVVDELVKVMGRHKPENIVIEMARENQTTQKGQKNSRERMKRIEEGIKELGSQILKEHPVENTQLQNEKLYLYYLQNGRDMYVDQELDINRLSDYDVDHIVPQSFLKDDSIDNKVLTRSDKARGKSDNVPSEEVVKKMKNYWRQLLNAKLITQRKFDNLTKAERGGLSELDKAGFIKRQLVETRQITKHVAQILDSRMNTKYDENDKLIREVKVITLKSKLVSDFRKDFQFYKVREINNYHHAHDAYLNAVVGTALIKKYPKLESEFVYGDYKVYDVRKMIAKSEQEIGKATAKYFFYSNIMNFFKTEITLANGEIRKRPLIETNGETGEIVWDKGRDFATVRKVLSMPQVNIVKKTEVQTGGFSKESILPKRNSDKLIARKKDWDPKKYGGFDSPTVAYSVLVVAKVEKGKSKKLKSVKELLGITIMERSSFEKNPIDFLEAKGYKEVKKDLIIKLPKYSLFELENGRKRMLASAGELQKGNELALPSKYVNFLYLASHYEKLKGSPEDNEQKQLFVEQHKHYLDEIIEQISEFSKRVILADANLDKVLSAYNKHRDKPIREQAENIIHLFTLTNLGAPAAFKYFDTTIDRKRYTSTKEVLDATLIHQSITGLYETRIDLSQLGGDGGSGGSSGGSSGSETPGTSESATPESSGGSSGGSSGGTVSLQDEHRLFDIPVTTSLPDVWLQDFPQAWAETGGLGRAKCQAPIIIDLKPTAVPVSIKQYPMSLEAHMGIRQHIIKFLELGVLRPCRSPWNTPLLPVKKPGTQDYRPVQDLREINKRTVDIHPTVPNPYNLLSTLKPDYSWYTVLDLKDAFFCLPLAPQSQELFAFEWKDPERGISGQLTWTRLPQGFKNSPTLFDEALHRDLTDFRTQHPEVTLLQYVDDLLLAAPTKKACTQGTRHLLQELGEKGYRASAKKAQICQTKVTYLGYILSEGKRWLTPGRIETVARIPPPRNPREVREFLGTAGFCRLWIPGFAELAAPLYALTKESTPFTWQTEHQLAFEALKKALLSAPALGLPDTSKPFTLFLDERQGIAKGVLTQKLGPWKRPVAYLSKKLDPVAAGWPPCLRIMAATAMLVKDSAKLTLGQPLTVITPHTLEAIVRQPPDRWITNARLTHYQALLLDTDRVQFGPPVTLNPATLLPVPENQPSPHDCRQVLAETHGTREDLKDQELPDADHTWYTDGSSYLDSGTRRAGAAVVDGHNTIWAQSLPPGTSAQKAELIALTKALELSKGKKANIYTDSRYAFATAHTHGSIYERRGLLTSEGKEIKNKAEIIALLKALFLPQEVAIIHCPGHQKGQDPVAVGNRQADRVARQAAMAEVLTLATEPDNTSHITAGKRTADGSEFEKRTADGSEFESPKKKAKVE

SEQ ID NO: 7723 - protein, 2124 aa, synthetic construct
MPAAKRVKLDGGDKKYSIGLDIGTNSVGWAVITDEYKVPSKKFKVLGNTDRHSIKKNLIGALLFDSGETAEATRLKRTARRRYTRRKNRICYLQEIFSNEMAKVDDSFFHRLEESFLVEEDKKHERHPIFGNIVDEVAYHEKYPTIYHLRKKLVDSTDKADLRLIYLALAHMIKFRGHFLIEGDLNPDNSDVDKLFIQLVQTYNQLFEENPINASGVDAKAILSARLSKSRRLENLIAQLPGEKKNGLFGNLIALSLGLTPNFKSNFDLAEDAKLQLSKDTYDDDLDNLLAQIGDQYADLFLAAKNLSDAILLSDILRVNTEITKAPLSASMIKRYDEHHQDLTLLKALVRQQLPEKYKEIFFDQSKNGYAGYIDGGASQEEFYKFIKPILEKMDGTEELLVKLNREDLLRKQRTFDNGSIPHQIHLGELHAILRRQEDFYPFLKDNREKIEKILTFRIPYYVGPLARGNSRFAWMTRKSEETITPWNFEEVVDKGASAQSFIERMTNFDKNLPNEKVLPKHSLLYEYFTVYNELTKVKYVTEGMRKPAFLSGEQKKAIVDLLFKTNRKVTVKQLKEDYFKKIECFDSVEISGVEDRFNASLGTYHDLLKIIKDKDFLDNEENEDILEDIVLTLTLFEDREMIEERLKTYAHLFDDKVMKQLKRRRYTGWGRLSRKLINGIRDKQSGKTILDFLKSDGFANRNFMQLIHDDSLTFKEDIQKAQVSGQGDSLHEHIANLAGSPAIKKGILQTVKVVDELVKVMGRHKPENIVIEMARENQTTQKGQKNSRERMKRIEEGIKELGSQILKEHPVENTQLQNEKLYLYYLQNGRDMYVDQELDINRLSDYDVDHIVPQSFLKDDSIDNKVLTRSDKARGKSDNVPSEEVVKKMKNYWRQLLNAKLITQRKFDNLTKAERGGLSELDKAGFIKRQLVETRQITKHVAQILDSRMNTKYDENDKLIREVKVITLKSKLVSDFRKDFQFYKVREINNYHHAHDAYLNAVVGTALIKKYPKLESEFVYGDYKVYDVRKMIAKSEQEIGKATAKYFFYSNIMNFFKTEITLANGEIRKRPLIETNGETGEIVWDKGRDFATVRKVLSMPQVNIVKKTEVQTGGFSKESILPKRNSDKLIARKKDWDPKKYGGFDSPTVAYSVLVVAKVEKGKSKKLKSVKELLGITIMERSSFEKNPIDFLEAKGYKEVKKDLIIKLPKYSLFELENGRKRMLASAGELQKGNELALPSKYVNFLYLASHYEKLKGSPEDNEQKQLFVEQHKHYLDEIIEQISEFSKRVILADANLDKVLSAYNKHRDKPIREQAENIIHLFTLTNLGAPAAFKYFDTTIDRKRYTSTKEVLDATLIHQSITGLYETRIDLSQLGGDGGSGGSSGGSSGSETPGTSESATPESSGGSSGGSSGGTVSLQDEHRLFDIPVTTSLPDVWLQDFPQAWAETGGLGRAKCQAPIIIDLKPTAVPVSIKQYPMSLEAHMGIRQHIIKFLELGVLRPCRSPWNTPLLPVKKPGTQDYRPVQDLREINKRTVDIHPTVPNPYNLLSTLKPDYSWYTVLDLKDAFFCLPLAPQSQELFAFEWKDPERGISGQLTWTRLPQGFKNSPTLFNEALHRDLTDFRTQHPEVTLLQYVDDLLLAAPTKKACTQGTRHLLQELGEKGYRASAKKAQICQTKVTYLGYILSEGKRWLTPGRIETVARIPPPRNPREVREFLGTAGFCRLWIPGFAELAAPLYALTKPSTPFTWQTEHQLAFEALKKALLSAPALGLPDTSKPFTLFLDERQGIAKGVLTQKLGPWKRPVAYLSKKLDPVAAGWPPCLRIMAATAMLVKDSAKLTLGQPLTVITPHTLEAIVRQPPDRWITNARLTHYQALLLDTDRVQFGPPVTLNPATLLPVPENQPSPHDCRQVLAETHGTREDLKDQELPDADHTWYTDGSSYLDSGTRRAGAAVVDGHNTIWAQSLPPGTSAQKAELIALTKALELSKGKKANIYTDSRYAFATAHTHGSIYERRGWLTSEGKEIKNKAEIIALLKALFLPQEVAIIHCPGHQKGQDPVAVGNRQADRVARQAAMAEVLTLATEPDNTSHITAGKRTADGSEFEKRTADGSEFESPKKKAKVE

SEQ ID NO: 7724 - protein, 2109 aa, synthetic construct
MPAAKRVKLDGGDKKYSIGLDIGTNSVGWAVITDEYKVPSKKFKVLGNTDRHSIKKNLIGALLFDSGETAEATRLKRTARRRYTRRKNRICYLQEIFSNEMAKVDDSFFHRLEESFLVEEDKKHERHPIFGNIVDEVAYHEKYPTIYHLRKKLVDSTDKADLRLIYLALAHMIKFRGHFLIEGDLNPDNSDVDKLFIQLVQTYNQLFEENPINASGVDAKAILSARLSKSRRLENLIAQLPGEKKNGLFGNLIALSLGLTPNFKSNFDLAEDAKLQLSKDTYDDDLDNLLAQIGDQYADLFLAAKNLSDAILLSDILRVNTEITKAPLSASMIKRYDEHHQDLTLLKALVRQQLPEKYKEIFFDQSKNGYAGYIDGGASQEEFYKFIKPILEKMDGTEELLVKLNREDLLRKQRTFDNGSIPHQIHLGELHAILRRQEDFYPFLKDNREKIEKILTFRIPYYVGPLARGNSRFAWMTRKSEETITPWNFEEVVDKGASAQSFIERMTNFDKNLPNEKVLPKHSLLYEYFTVYNELTKVKYVTEGMRKPAFLSGEQKKAIVDLLFKTNRKVTVKQLKEDYFKKIECFDSVEISGVEDRFNASLGTYHDLLKIIKDKDFLDNEENEDILEDIVLTLTLFEDREMIEERLKTYAHLFDDKVMKQLKRRRYTGWGRLSRKLINGIRDKQSGKTILDFLKSDGFANRNFMQLIHDDSLTFKEDIQKAQVSGQGDSLHEHIANLAGSPAIKKGILQTVKVVDELVKVMGRHKPENIVIEMARENQTTQKGQKNSRERMKRIEEGIKELGSQILKEHPVENTQLQNEKLYLYYLQNGRDMYVDQELDINRLSDYDVDHIVPQSFLKDDSIDNKVLTRSDKARGKSDNVPSEEVVKKMKNYWRQLLNAKLITQRKFDNLTKAERGGLSELDKAGFIKRQLVETRQITKHVAQILDSRMNTKYDENDKLIREVKVITLKSKLVSDFRKDFQFYKVREINNYHHAHDAYLNAVVGTALIKKYPKLESEFVYGDYKVYDVRKMIAKSEQEIGKATAKYFFYSNIMNFFKTEITLANGEIRKRPLIETNGETGEIVWDKGRDFATVRKVLSMPQVNIVKKTEVQTGGFSKESILPKRNSDKLIARKKDWDPKKYGGFDSPTVAYSVLVVAKVEKGKSKKLKSVKELLGITIMERSSFEKNPIDFLEAKGYKEVKKDLIIKLPKYSLFELENGRKRMLASAGELQKGNELALPSKYVNFLYLASHYEKLKGSPEDNEQKQLFVEQHKHYLDEIIEQISEFSKRVILADANLDKVLSAYNKHRDKPIREQAENIIHLFTLTNLGAPAAFKYFDTTIDRKRYTSTKEVLDATLIHQSITGLYETRIDLSQLGGDGGSGGSSGGSSGSETPGTSESATPESSGGSSGGSSGGVPWILKKPLELTIKLDLEEQQGTLLNNSILSKKGKEELKQLFEKYSALWQSWENQVGHRRIRPHKIATGTVKPTPQKQYHINPKAKPDIQIVINDLLKQGVLIQKESTMNTPVYPVPKPNGRWRMVLDYRAVNKVTPLIAVQNQHSYGILGSLFKGRYKTTIDLSNGFWAHPIVPEDYWITAFTWQGKQYCWTVLPQGFLNSPGLFTGDVVDLLQGIPNVEVYVDDVYISHDSEKEHLEYLDILFNRLKEAGYIISLKKSNIANSIVDFLGFQITNEGRGLTDTFKEKLENITAPTTLKQLQSILGLLNFARNFIPDFTELIAPLYALIPKSTKNYVPWQIEHSTTLETLITKLNGAEYLQGRKGDKTLIMKVNASYTTGYIRYYNEGEKKPISYVSIVFSKTELKFTELEKLLTTVHKGLLKALDLSMGQNIHVYSPIVSMQNIQKTPQTAKKALASRWLSWLSYLEDPRIRFFYDPQMPALKDLPAVDTGKDNKKHPSNFQHIFYTDGSAITSPTKEGHLNAGMGIVYFINKDGNLQKQQEWSISLGNHTAQFAEIAAFEFALKKCLPLGGNILVVTDSNYVAKAYNEELDVWASNGFVNNRKKPLKHISKWKSVADLKRLRPDVVVTHEPGHQKLDSSPHAYGNNLADQLATQASFKVHAGKRTADGSEFEKRTADGSEFESPKKKAKVE

SEQ ID NO: 7725 - protein, 2109 aa, synthetic construct
MPAAKRVKLDGGDKKYSIGLDIGTNSVGWAVITDEYKVPSKKFKVLGNTDRHSIKKNLIGALLFDSGETAEATRLKRTARRRYTRRKNRICYLQEIFSNEMAKVDDSFFHRLEESFLVEEDKKHERHPIFGNIVDEVAYHEKYPTIYHLRKKLVDSTDKADLRLIYLALAHMIKFRGHFLIEGDLNPDNSDVDKLFIQLVQTYNQLFEENPINASGVDAKAILSARLSKSRRLENLIAQLPGEKKNGLFGNLIALSLGLTPNFKSNFDLAEDAKLQLSKDTYDDDLDNLLAQIGDQYADLFLAAKNLSDAILLSDILRVNTEITKAPLSASMIKRYDEHHQDLTLLKALVRQQLPEKYKEIFFDQSKNGYAGYIDGGASQEEFYKFIKPILEKMDGTEELLVKLNREDLLRKQRTFDNGSIPHQIHLGELHAILRRQEDFYPFLKDNREKIEKILTFRIPYYVGPLARGNSRFAWMTRKSEETITPWNFEEVVDKGASAQSFIERMTNFDKNLPNEKVLPKHSLLYEYFTVYNELTKVKYVTEGMRKPAFLSGEQKKAIVDLLFKTNRKVTVKQLKEDYFKKIECFDSVEISGVEDRFNASLGTYHDLLKIIKDKDFLDNEENEDILEDIVLTLTLFEDREMIEERLKTYAHLFDDKVMKQLKRRRYTGWGRLSRKLINGIRDKQSGKTILDFLKSDGFANRNFMQLIHDDSLTFKEDIQKAQVSGQGDSLHEHIANLAGSPAIKKGILQTVKVVDELVKVMGRHKPENIVIEMARENQTTQKGQKNSRERMKRIEEGIKELGSQILKEHPVENTQLQNEKLYLYYLQNGRDMYVDQELDINRLSDYDVDHIVPQSFLKDDSIDNKVLTRSDKARGKSDNVPSEEVVKKMKNYWRQLLNAKLITQRKFDNLTKAERGGLSELDKAGFIKRQLVETRQITKHVAQILDSRMNTKYDENDKLIREVKVITLKSKLVSDFRKDFQFYKVREINNYHHAHDAYLNAVVGTALIKKYPKLESEFVYGDYKVYDVRKMIAKSEQEIGKATAKYFFYSNIMNFFKTEITLANGEIRKRPLIETNGETGEIVWDKGRDFATVRKVLSMPQVNIVKKTEVQTGGFSKESILPKRNSDKLIARKKDWDPKKYGGFDSPTVAYSVLVVAKVEKGKSKKLKSVKELLGITIMERSSFEKNPIDFLEAKGYKEVKKDLIIKLPKYSLFELENGRKRMLASAGELQKGNELALPSKYVNFLYLASHYEKLKGSPEDNEQKQLFVEQHKHYLDEIIEQISEFSKRVILADANLDKVLSAYNKHRDKPIREQAENIIHLFTLTNLGAPAAFKYFDTTIDRKRYTSTKEVLDATLIHQSITGLYETRIDLSQLGGDGGSGGSSGGSSGSETPGTSESATPESSGGSSGGSSGGVPWLTQQPLQLTILVPLQEYQEKILSKTALPEDQKQQLKTLFVKYDNLWQHWENQVGHRKIRPHNIATGDYPPRPQKQYPINPKAKPSIQIVIDDLLKQGVLTPQNSTMNTPVYPVPKPDGRWRMVLDYREVNKTIPLTAAQNQHSAGILATIVRQKYKTTLDLANGFWAHPITPESYWLTAFTWQGKQYCWTRLPQGFLNSPALFNADVVDLLKEIPNVQVYVDDIYLSHDDPKEHVQQLEKVFQILLQAGYVVSLKKSEIGQKTVEFLGFNITKEGRGLTDTFKTKLLNITPPKDLKQLQSILGLLNFARNFIPNFAELVQPLYNLIAPAKGKYIEWSEENTKQLNMVIEALNTASNLEERLPEQRLVIKVNTSPSAGYVRYYNETGKKPIMYLNYVFSKAELKFSMLEKLLTTMHKALIKAMDLAMGQEILVYSPIVSMTKIQKTPLPERKALPIRWITWMTYLEDPRIQFHYDKTLPELKHIPDVYTSSQSPVKHPSQYEGVFYTDGSAIKSPDPTKSNNAGMGIVHATYKPEYQVLNQWSIPLGNHTAQMAEIAAVEFACKKALKIPGPVLVITDSFYVAESANKELPYWKSNGFVNNKKKPLKHISKWKSIAECLSMKPDITIQHEKGISLQIPVFILKGNALADKLATQGSYVVNAGKRTADGSEFEKRTADGSEFESPKKKAKVE

SEQ ID NO: 7726 - protein, 2198 aa, synthetic construct
MPAAKRVKLDGGDKKYSIGLDIGTNSVGWAVITDEYKVPSKKFKVLGNTDRHSIKKNLIGALLFDSGETAEATRLKRTARRRYTRRKNRICYLQEIFSNEMAKVDDSFFHRLEESFLVEEDKKHERHPIFGNIVDEVAYHEKYPTIYHLRKKLVDSTDKADLRLIYLALAHMIKFRGHFLIEGDLNPDNSDVDKLFIQLVQTYNQLFEENPINASGVDAKAILSARLSKSRRLENLIAQLPGEKKNGLFGNLIALSLGLTPNFKSNFDLAEDAKLQLSKDTYDDDLDNLLAQIGDQYADLFLAAKNLSDAILLSDILRVNTEITKAPLSASMIKRYDEHHQDLTLLKALVRQQLPEKYKEIFFDQSKNGYAGYIDGGASQEEFYKFIKPILEKMDGTEELLVKLNREDLLRKQRTFDNGSIPHQIHLGELHAILRRQEDFYPFLKDNREKIEKILTFRIPYYVGPLARGNSRFAWMTRKSEETITPWNFEEVVDKGASAQSFIERMTNFDKNLPNEKVLPKHSLLYEYFTVYNELTKVKYVTEGMRKPAFLSGEQKKAIVDLLFKTNRKVTVKQLKEDYFKKIECFDSVEISGVEDRFNASLGTYHDLLKIIKDKDFLDNEENEDILEDIVLTLTLFEDREMIEERLKTYAHLFDDKVMKQLKRRRYTGWGRLSRKLINGIRDKQSGKTILDFLKSDGFANRNFMQLIHDDSLTFKEDIQKAQVSGQGDSLHEHIANLAGSPAIKKGILQTVKVVDELVKVMGRHKPENIVIEMARENQTTQKGQKNSRERMKRIEEGIKELGSQILKEHPVENTQLQNEKLYLYYLQNGRDMYVDQELDINRLSDYDVDHIVPQSFLKDDSIDNKVLTRSDKARGKSDNVPSEEVVKKMKNYWRQLLNAKLITQRKFDNLTKAERGGLSELDKAGFIKRQLVETRQITKHVAQILDSRMNTKYDENDKLIREVKVITLKSKLVSDFRKDFQFYKVREINNYHHAHDAYLNAVVGTALIKKYPKLESEFVYGDYKVYDVRKMIAKSEQEIGKATAKYFFYSNIMNFFKTEITLANGEIRKRPLIETNGETGEIVWDKGRDFATVRKVLSMPQVNIVKKTEVQTGGFSKESILPKRNSDKLIARKKDWDPKKYGGFDSPTVAYSVLVVAKVEKGKSKKLKSVKELLGITIMERSSFEKNPIDFLEAKGYKEVKKDLIIKLPKYSLFELENGRKRMLASAGELQKGNELALPSKYVNFLYLASHYEKLKGSPEDNEQKQLFVEQHKHYLDEIIEQISEFSKRVILADANLDKVLSAYNKHRDKPIREQAENIIHLFTLTNLGAPAAFKYFDTTIDRKRYTSTKEVLDATLIHQSITGLYETRIDLSQLGGDGGSGGSSGGSSGSETPGTSESATPESSGGSSGGSSGGMNPLQLLQPLPAEIKGTKLLAHWNSGATITCIPESFLEDEQPIKKTLIKTIHGEKQQNVYYVTFKVKGRKVEAEVIASPYEYILLSPTDVPWLTQQPLQLTILVPLQEYQEKILSKTALPEDQKQQLKTLFVKYDNLWQHWENQVGHRKIRPHNIATGDYPPRPQKQYPINPKAKPSIQIVIDDLLKQGVLTPQNSTMNTPVYPVPKPDGRWRMVLDYREVNKTIPLTAAQNQHSAGILATIVRQKYKTTLDLANGFWAHPITPESYWLTAFTWQGKQYCWTRLPQGFLNSPALFNADVVDLLKEIPNVQVYVDDIYLSHDDPKEHVQQLEKVFQILLQAGYVVSLKKSEIGQKTVEFLGFNITKEGRGLTDTFKTKLLNITPPKDLKQLQSILGLLNFARNFIPNFAELVQPLYNLIAPAKGKYIEWSEENTKQLNMVIEALNTASNLEERLPEQRLVIKVNTSPSAGYVRYYNETGKKPIMYLNYVFSKAELKFSMLEKLLTTMHKALIKAMDLAMGQEILVYSPIVSMTKIQKTPLPERKALPIRWITWMTYLEDPRIQFHYDKTLPELKHIPDVYTSSQSPVKHPSQYEGVFYTDGSAIKSPDPTKSNNAGMGIVHATYKPEYQVLNQWSIPLGNHTAQMAEIAAVEFACKKALKIPGPVLVITDSFYVAESANKELPYWKSNGFVNNKKKPLKHISKWKSIAECLSMKPDITIQHEKGISLQIPVFILKGNALADKLATQGSYVVNAGKRTADGSEFEKRTADGSEFESPKKKAKVE

SEQ ID NO: 7727 - protein, 2149 aa, synthetic construct
MPAAKRVKLDGGDKKYSIGLDIGTNSVGWAVITDEYKVPSKKFKVLGNTDRHSIKKNLIGALLFDSGETAEATRLKRTARRRYTRRKNRICYLQEIFSNEMAKVDDSFFHRLEESFLVEEDKKHERHPIFGNIVDEVAYHEKYPTIYHLRKKLVDSTDKADLRLIYLALAHMIKFRGHFLIEGDLNPDNSDVDKLFIQLVQTYNQLFEENPINASGVDAKAILSARLSKSRRLENLIAQLPGEKKNGLFGNLIALSLGLTPNFKSNFDLAEDAKLQLSKDTYDDDLDNLLAQIGDQYADLFLAAKNLSDAILLSDILRVNTEITKAPLSASMIKRYDEHHQDLTLLKALVRQQLPEKYKEIFFDQSKNGYAGYIDGGASQEEFYKFIKPILEKMDGTEELLVKLNREDLLRKQRTFDNGSIPHQIHLGELHAILRRQEDFYPFLKDNREKIEKILTFRIPYYVGPLARGNSRFAWMTRKSEETITPWNFEEVVDKGASAQSFIERMTNFDKNLPNEKVLPKHSLLYEYFTVYNELTKVKYVTEGMRKPAFLSGEQKKAIVDLLFKTNRKVTVKQLKEDYFKKIECFDSVEISGVEDRFNASLGTYHDLLKIIKDKDFLDNEENEDILEDIVLTLTLFEDREMIEERLKTYAHLFDDKVMKQLKRRRYTGWGRLSRKLINGIRDKQSGKTILDFLKSDGFANRNFMQLIHDDSLTFKEDIQKAQVSGQGDSLHEHIANLAGSPAIKKGILQTVKVVDELVKVMGRHKPENIVIEMARENQTTQKGQKNSRERMKRIEEGIKELGSQILKEHPVENTQLQNEKLYLYYLQNGRDMYVDQELDINRLSDYDVDHIVPQSFLKDDSIDNKVLTRSDKARGKSDNVPSEEVVKKMKNYWRQLLNAKLITQRKFDNLTKAERGGLSELDKAGFIKRQLVETRQITKHVAQILDSRMNTKYDENDKLIREVKVITLKSKLVSDFRKDFQFYKVREINNYHHAHDAYLNAVVGTALIKKYPKLESEFVYGDYKVYDVRKMIAKSEQEIGKATAKYFFYSNIMNFFKTEITLANGEIRKRPLIETNGETGEIVWDKGRDFATVRKVLSMPQVNIVKKTEVQTGGFSKESILPKRNSDKLIARKKDWDPKKYGGFDSPTVAYSVLVVAKVEKGKSKKLKSVKELLGITIMERSSFEKNPIDFLEAKGYKEVKKDLIIKLPKYSLFELENGRKRMLASAGELQKGNELALPSKYVNFLYLASHYEKLKGSPEDNEQKQLFVEQHKHYLDEIIEQISEFSKRVILADANLDKVLSAYNKHRDKPIREQAENIIHLFTLTNLGAPAAFKYFDTTIDRKRYTSTKEVLDATLIHQSITGLYETRIDLSQLGGDGGSGGSSGGSSGSETPGTSESATPESSGGSSGGSSGGLLGRDLLTKLKAQIQFSTEGPQVTWEDRPAMCLVLNLEEEYRLHEKPVPPSIDPSWLQLFPMVWAEKAGMGLANQVPPVVVELKSDASPVAVRQYPMSKEAREGIRPHIQRFLDLGILVPCQSPWNTPLLPVKKPGTNDYRPVQDLREVNKRVQDIHPTVPNPYNLLSSLPPSHTWYSVLDLKDAFFCLKLHPNSQPLFAFEWRDPEKGNTGQLTWTRLPQGFKNSPTLFDEALHRDLASFRALNPQVVMLQYVDDLLVAAPTYRDCKEGTRRLLQELSKLGYRVSAKKAQLCREEVTYLGYLLKGGKRWLTPARKATVMKIPTPTTPRQVREFLGTAGFCRLWIPGFASLAAPLYPLTREKVPFTWTEAHQEAFGRIKEALLSAPALALPDLTKPFALYVDEKEGVARGVLTQTLGPWRRPVAYLSKKLDPVASGWPTCLKAIAAVALLLKDADKLTLGQNVLVIAPHNLESIVRQPPDRWMTNARMTHYQSLLLNERVSFAPPAILNPATLLPVESDDTPIHICSEILAEETGTRPDLRDQPLPGVPAWYTDGSSFIMDGRRQAGAAIVDNKRTVWASNLPEGTSAQKAELIALTQALRLAEGKSINIYTDSRYAFATAHVHGAIYKQRGLLTSAGKDIKNKEEILALLEAIHLPKRVAIIHCPGHQRGTDPVATGNRKADEAAKQAAQSTRILTETTKNAGKRTADGSEFEKRTADGSEFESPKKKAKVE

SEQ ID NO: 7728 - protein, 2149 aa, synthetic construct
MPAAKRVKLDGGDKKYSIGLDIGTNSVGWAVITDEYKVPSKKFKVLGNTDRHSIKKNLIGALLFDSGETAEATRLKRTARRRYTRRKNRICYLQEIFSNEMAKVDDSFFHRLEESFLVEEDKKHERHPIFGNIVDEVAYHEKYPTIYHLRKKLVDSTDKADLRLIYLALAHMIKFRGHFLIEGDLNPDNSDVDKLFIQLVQTYNQLFEENPINASGVDAKAILSARLSKSRRLENLIAQLPGEKKNGLFGNLIALSLGLTPNFKSNFDLAEDAKLQLSKDTYDDDLDNLLAQIGDQYADLFLAAKNLSDAILLSDILRVNTEITKAPLSASMIKRYDEHHQDLTLLKALVRQQLPEKYKEIFFDQSKNGYAGYIDGGASQEEFYKFIKPILEKMDGTEELLVKLNREDLLRKQRTFDNGSIPHQIHLGELHAILRRQEDFYPFLKDNREKIEKILTFRIPYYVGPLARGNSRFAWMTRKSEETITPWNFEEVVDKGASAQSFIERMTNFDKNLPNEKVLPKHSLLYEYFTVYNELTKVKYVTEGMRKPAFLSGEQKKAIVDLLFKTNRKVTVKQLKEDYFKKIECFDSVEISGVEDRFNASLGTYHDLLKIIKDKDFLDNEENEDILEDIVLTLTLFEDREMIEERLKTYAHLFDDKVMKQLKRRRYTGWGRLSRKLINGIRDKQSGKTILDFLKSDGFANRNFMQLIHDDSLTFKEDIQKAQVSGQGDSLHEHIANLAGSPAIKKGILQTVKVVDELVKVMGRHKPENIVIEMARENQTTQKGQKNSRERMKRIEEGIKELGSQILKEHPVENTQLQNEKLYLYYLQNGRDMYVDQELDINRLSDYDVDHIVPQSFLKDDSIDNKVLTRSDKARGKSDNVPSEEVVKKMKNYWRQLLNAKLITQRKFDNLTKAERGGLSELDKAGFIKRQLVETRQITKHVAQILDSRMNTKYDENDKLIREVKVITLKSKLVSDFRKDFQFYKVREINNYHHAHDAYLNAVVGTALIKKYPKLESEFVYGDYKVYDVRKMIAKSEQEIGKATAKYFFYSNIMNFFKTEITLANGEIRKRPLIETNGETGEIVWDKGRDFATVRKVLSMPQVNIVKKTEVQTGGFSKESILPKRNSDKLIARKKDWDPKKYGGFDSPTVAYSVLVVAKVEKGKSKKLKSVKELLGITIMERSSFEKNPIDFLEAKGYKEVKKDLIIKLPKYSLFELENGRKRMLASAGELQKGNELALPSKYVNFLYLASHYEKLKGSPEDNEQKQLFVEQHKHYLDEIIEQISEFSKRVILADANLDKVLSAYNKHRDKPIREQAENIIHLFTLTNLGAPAAFKYFDTTIDRKRYTSTKEVLDATLIHQSITGLYETRIDLSQLGGDGGSGGSSGGSSGSETPGTSESATPESSGGSSGGSSGGLLGRDLLTKLKAQIQFSTEGPQVTWEDRPAMCLVLNLEEEYRLHEKPVPPSIDPSWLQLFPMVWAEKAGMGLANQVPPVVVELKSDASPVAVRQYPMSKEAREGIRPHIQRFLDLGILVPCQSPWNTPLLPVKKPGTNDYRPVQDLREVNKRVQDIHPTVPNPYNLLSSLPPSHTWYSVLDLKDAFFCLKLHPNSQPLFAFEWRDPEKGNTGQLTWTRLPQGFKNSPTLFNEALHRDLASFRALNPQVVMLQYVDDLLVAAPTYRDCKEGTRRLLQELSKLGYRVSAKKAQLCREEVTYLGYLLKGGKRWLTPARKATVMKIPTPTTPRQVREFLGKAGFCRLFIPGFASLAAPLYPLTRPKVPFTWTEAHQEAFGRIKEALLSAPALALPDLTKPFALYVDEKEGVARGVLTQTLGPWRRPVAYLSKKLDPVASGWPTCLKAIAAVALLLKDADKLTLGQNVLVIAPHNLESIVRQPPDRWMTNARMTHYQSLLLNERVSFAPPAILNPATLLPVESDDTPIHICSEILAEETGTRPDLRDQPLPGVPAWYTDGSSFIMDGRRQAGAAIVDNKRTVWASNLPEGTSAQKAELIALTQALRLAEGKSINIYTDSRYAFATAHVHGAIYKQRGWLTSAGKDIKNKEEILALLEAIHLPKRVAIIHCPGHQRGTDPVATGNRKADEAAKQAAQSTRILTETTKNAGKRTADGSEFEKRTADGSEFESPKKKAKVE

SEQ ID NO: 7729 - protein, 2118 aa, synthetic construct
MPAAKRVKLDGGDKKYSIGLDIGTNSVGWAVITDEYKVPSKKFKVLGNTDRHSIKKNLIGALLFDSGETAEATRLKRTARRRYTRRKNRICYLQEIFSNEMAKVDDSFFHRLEESFLVEEDKKHERHPIFGNIVDEVAYHEKYPTIYHLRKKLVDSTDKADLRLIYLALAHMIKFRGHFLIEGDLNPDNSDVDKLFIQLVQTYNQLFEENPINASGVDAKAILSARLSKSRRLENLIAQLPGEKKNGLFGNLIALSLGLTPNFKSNFDLAEDAKLQLSKDTYDDDLDNLLAQIGDQYADLFLAAKNLSDAILLSDILRVNTEITKAPLSASMIKRYDEHHQDLTLLKALVRQQLPEKYKEIFFDQSKNGYAGYIDGGASQEEFYKFIKPILEKMDGTEELLVKLNREDLLRKQRTFDNGSIPHQIHLGELHAILRRQEDFYPFLKDNREKIEKILTFRIPYYVGPLARGNSRFAWMTRKSEETITPWNFEEVVDKGASAQSFIERMTNFDKNLPNEKVLPKHSLLYEYFTVYNELTKVKYVTEGMRKPAFLSGEQKKAIVDLLFKTNRKVTVKQLKEDYFKKIECFDSVEISGVEDRFNASLGTYHDLLKIIKDKDFLDNEENEDILEDIVLTLTLFEDREMIEERLKTYAHLFDDKVMKQLKRRRYTGWGRLSRKLINGIRDKQSGKTILDFLKSDGFANRNFMQLIHDDSLTFKEDIQKAQVSGQGDSLHEHIANLAGSPAIKKGILQTVKVVDELVKVMGRHKPENIVIEMARENQTTQKGQKNSRERMKRIEEGIKELGSQILKEHPVENTQLQNEKLYLYYLQNGRDMYVDQELDINRLSDYDVDHIVPQSFLKDDSIDNKVLTRSDKARGKSDNVPSEEVVKKMKNYWRQLLNAKLITQRKFDNLTKAERGGLSELDKAGFIKRQLVETRQITKHVAQILDSRMNTKYDENDKLIREVKVITLKSKLVSDFRKDFQFYKVREINNYHHAHDAYLNAVVGTALIKKYPKLESEFVYGDYKVYDVRKMIAKSEQEIGKATAKYFFYSNIMNFFKTEITLANGEIRKRPLIETNGETGEIVWDKGRDFATVRKVLSMPQVNIVKKTEVQTGGFSKESILPKRNSDKLIARKKDWDPKKYGGFDSPTVAYSVLVVAKVEKGKSKKLKSVKELLGITIMERSSFEKNPIDFLEAKGYKEVKKDLIIKLPKYSLFELENGRKRMLASAGELQKGNELALPSKYVNFLYLASHYEKLKGSPEDNEQKQLFVEQHKHYLDEIIEQISEFSKRVILADANLDKVLSAYNKHRDKPIREQAENIIHLFTLTNLGAPAAFKYFDTTIDRKRYTSTKEVLDATLIHQSITGLYETRIDLSQLGGDGGSGGSSGGSSGSETPGTSESATPESSGGSSGGSSGGTLNLEDEYRLYETSAEPEVSPGSTWLSDFPQAWAETGGMGLAVRQAPLIIPLKATSTPVSIKQYPMSQEAKLGIKPHIQRLLDQGILVPCQSPWNTPLLPVKKPGTNDYRPVQDLREVNKRVEDIHPTVPNPYNLLSGLPPSHRWYTVLDLKDAFFCLRLHPTSQPLFAFEWRDPGMGISGQLTWTRLPQGFKNSPTLFNEALHRDLADFRIQHPDLILLQYVDDILLAATSELDCQQGTRALLLTLGNLGYRASAKKAQLCQKQVKYLGYLLKEGQRWLTEARKETVMGQPTPKTPRQLREFLGKAGFCRLFIPGFAEMAAPLYPLTKPGTLFNWGPDQQKAYQEIKQALLTAPALGLPDLTKPFELFVDEKQGYAKGVLTQKLGPWRRPVAYLSKKLDPVAAGWPPCLRMVAAIAVLRKDAGKLTMGQPLVILAPHAVEALVKQPPDRWLSNARMTHYQAMLLDTDRVQFGPVVALNPATLLPLPEEGAPHDCLEILAETHGTRPDLTDQPIPDADHTWYTDGSSFLQEGQRKAGAAVTTETEVIWARALPAGTSAQRAELIALTQALKMAEGKRLNVYTDSRYAFATAHIHGEIYRRRGWLTSEGREIKNKSEILALLKALFLPKRLSIIHCLGHQKGDSAEARGNRLADQAAREAAIKTPPDTSTLLAGKRTADGSEFEKRTADGSEFESPKKKAKVE

SEQ ID NO: 7730 - protein, 2118 aa, synthetic construct
MPAAKRVKLDGGDKKYSIGLDIGTNSVGWAVITDEYKVPSKKFKVLGNTDRHSIKKNLIGALLFDSGETAEATRLKRTARRRYTRRKNRICYLQEIFSNEMAKVDDSFFHRLEESFLVEEDKKHERHPIFGNIVDEVAYHEKYPTIYHLRKKLVDSTDKADLRLIYLALAHMIKFRGHFLIEGDLNPDNSDVDKLFIQLVQTYNQLFEENPINASGVDAKAILSARLSKSRRLENLIAQLPGEKKNGLFGNLIALSLGLTPNFKSNFDLAEDAKLQLSKDTYDDDLDNLLAQIGDQYADLFLAAKNLSDAILLSDILRVNTEITKAPLSASMIKRYDEHHQDLTLLKALVRQQLPEKYKEIFFDQSKNGYAGYIDGGASQEEFYKFIKPILEKMDGTEELLVKLNREDLLRKQRTFDNGSIPHQIHLGELHAILRRQEDFYPFLKDNREKIEKILTFRIPYYVGPLARGNSRFAWMTRKSEETITPWNFEEVVDKGASAQSFIERMTNFDKNLPNEKVLPKHSLLYEYFTVYNELTKVKYVTEGMRKPAFLSGEQKKAIVDLLFKTNRKVTVKQLKEDYFKKIECFDSVEISGVEDRFNASLGTYHDLLKIIKDKDFLDNEENEDILEDIVLTLTLFEDREMIEERLKTYAHLFDDKVMKQLKRRRYTGWGRLSRKLINGIRDKQSGKTILDFLKSDGFANRNFMQLIHDDSLTFKEDIQKAQVSGQGDSLHEHIANLAGSPAIKKGILQTVKVVDELVKVMGRHKPENIVIEMARENQTTQKGQKNSRERMKRIEEGIKELGSQILKEHPVENTQLQNEKLYLYYLQNGRDMYVDQELDINRLSDYDVDHIVPQSFLKDDSIDNKVLTRSDKARGKSDNVPSEEVVKKMKNYWRQLLNAKLITQRKFDNLTKAERGGLSELDKAGFIKRQLVETRQITKHVAQILDSRMNTKYDENDKLIREVKVITLKSKLVSDFRKDFQFYKVREINNYHHAHDAYLNAVVGTALIKKYPKLESEFVYGDYKVYDVRKMIAKSEQEIGKATAKYFFYSNIMNFFKTEITLANGEIRKRPLIETNGETGEIVWDKGRDFATVRKVLSMPQVNIVKKTEVQTGGFSKESILPKRNSDKLIARKKDWDPKKYGGFDSPTVAYSVLVVAKVEKGKSKKLKSVKELLGITIMERSSFEKNPIDFLEAKGYKEVKKDLIIKLPKYSLFELENGRKRMLASAGELQKGNELALPSKYVNFLYLASHYEKLKGSPEDNEQKQLFVEQHKHYLDEIIEQISEFSKRVILADANLDKVLSAYNKHRDKPIREQAENIIHLFTLTNLGAPAAFKYFDTTIDRKRYTSTKEVLDATLIHQSITGLYETRIDLSQLGGDGGSGGSSGGSSGSETPGTSESATPESSGGSSGGSSGGTLNIEDEYRLHETSKEPDVSLGSTWLSDFPQAWAETGGMGLAVRQAPLIIPLKATSTPVSIKQYPMSQEARLGIKPHIQRLLDQGILVPCQSPWNTPLLPVKKPGTNDYRPVQDLREVNKRVEDIHPTVPNPYNLLSGLPPSHQWYTVLDLKDAFFCLRLHPTSQPLFAFEWRDPEMGISGQLTWTRLPQGFKNSPTLFNEALHRDLAGFRIQHPDLILLQYVDDLLLAATSELDCQQGTRALLQTLGDLGYRASAKKAQICQKQVKYLGYLLKEGQRWLTEARKETVMGQPIPKTPRQLREFLGTAGFCRLWIPGFAEMAAPLYPLTKPGTLFNWGPDQQKAFQEIKQALLTAPALGLPDLTKPFELFVDEKQGYAKGVLTQKLGPWRRPVAYLSKKLDPVAAGWPPCLRMVAAIAVLTKDAGKLTMGQPLVILAPHAVEALVKQPPDRWLSNARMTHYQALLLDTDRVQFGPVVALNPATLLPLPEEGLQHDCLDILAEAHGTRSDLMDQPLPDADHTWYTDGSSFLQEGQRKAGAAVTTETEVIWARALPAGTSAQRAELIALTQALKMAEGKKLNVYTDSRYAFATAHIHGEIYRRRGWLTSEGKEIKNKDEILALLKALFLPKRLSIIHCPGHQKGNSAEARGNRMADQAAREVATRETPETSTLLAGKRTADGSEFEKRTADGSEFESPKKKAKVE

SEQ ID NO: 7731 - protein, 2118 aa, synthetic construct
MPAAKRVKLDGGDKKYSIGLDIGTNSVGWAVITDEYKVPSKKFKVLGNTDRHSIKKNLIGALLFDSGETAEATRLKRTARRRYTRRKNRICYLQEIFSNEMAKVDDSFFHRLEESFLVEEDKKHERHPIFGNIVDEVAYHEKYPTIYHLRKKLVDSTDKADLRLIYLALAHMIKFRGHFLIEGDLNPDNSDVDKLFIQLVQTYNQLFEENPINASGVDAKAILSARLSKSRRLENLIAQLPGEKKNGLFGNLIALSLGLTPNFKSNFDLAEDAKLQLSKDTYDDDLDNLLAQIGDQYADLFLAAKNLSDAILLSDILRVNTEITKAPLSASMIKRYDEHHQDLTLLKALVRQQLPEKYKEIFFDQSKNGYAGYIDGGASQEEFYKFIKPILEKMDGTEELLVKLNREDLLRKQRTFDNGSIPHQIHLGELHAILRRQEDFYPFLKDNREKIEKILTFRIPYYVGPLARGNSRFAWMTRKSEETITPWNFEEVVDKGASAQSFIERMTNFDKNLPNEKVLPKHSLLYEYFTVYNELTKVKYVTEGMRKPAFLSGEQKKAIVDLLFKTNRKVTVKQLKEDYFKKIECFDSVEISGVEDRFNASLGTYHDLLKIIKDKDFLDNEENEDILEDIVLTLTLFEDREMIEERLKTYAHLFDDKVMKQLKRRRYTGWGRLSRKLINGIRDKQSGKTILDFLKSDGFANRNFMQLIHDDSLTFKEDIQKAQVSGQGDSLHEHIANLAGSPAIKKGILQTVKVVDELVKVMGRHKPENIVIEMARENQTTQKGQKNSRERMKRIEEGIKELGSQILKEHPVENTQLQNEKLYLYYLQNGRDMYVDQELDINRLSDYDVDHIVPQSFLKDDSIDNKVLTRSDKARGKSDNVPSEEVVKKMKNYWRQLLNAKLITQRKFDNLTKAERGGLSELDKAGFIKRQLVETRQITKHVAQILDSRMNTKYDENDKLIREVKVITLKSKLVSDFRKDFQFYKVREINNYHHAHDAYLNAVVGTALIKKYPKLESEFVYGDYKVYDVRKMIAKSEQEIGKATAKYFFYSNIMNFFKTEITLANGEIRKRPLIETNGETGEIVWDKGRDFATVRKVLSMPQVNIVKKTEVQTGGFSKESILPKRNSDKLIARKKDWDPKKYGGFDSPTVAYSVLVVAKVEKGKSKKLKSVKELLGITIMERSSFEKNPIDFLEAKGYKEVKKDLIIKLPKYSLFELENGRKRMLASAGELQKGNELALPSKYVNFLYLASHYEKLKGSPEDNEQKQLFVEQHKHYLDEIIEQISEFSKRVILADANLDKVLSAYNKHRDKPIREQAENIIHLFTLTNLGAPAAFKYFDTTIDRKRYTSTKEVLDATLIHQSITGLYETRIDLSQLGGDGGSGGSSGGSSGSETPGTSESATPESSGGSSGGSSGGTLNIEDEHRLHETSKEPDVSLGSTWLSDFPQAWAETGGMGLAVRQAPLIIPLKATSTPVSIKQYPMSQEARLGIKPHIQRLLDQGILVPCQSPWNTPLLPVKKPGTNDYRPVQDLREVNKRVEDIHPTVPNPYNLLSGLPPSHQWYTVLDLKDAFFCLRLHPTSQPLFAFEWRDPEMGISGQLTWTRLPQGFKNSPTLFDEALHRDLADFRIQHPDLILLQYVDDLLLAATSELDCQQGTRALLQTLGNLGYRASAKKAQICQKQVKYLGYLLKEGQRWLTEARKETVMGQPTPKTPRQLREFLGTAGFCRLWIPGFAEMAAPLYPLTKTGTLFNWGPDQQKAYQEIKQALLTAPALGLPDLTKPFELFVDEKQGYAKGVLTQKLGPWRRPVAYLSKKLDPVAAGWPPCLRMVAAIAVLTKDAGKLTMGQPLVILAPHAVEALVKQPPDRWLSNARMTHYQALLLDTDRVQFGPVVALNPATLLPLPEEGLQHNCLDILAEAHGTRPDLTDQPLPDADHTWYTDGSSLLQEGQRKAGAAVTTETEVIWAKALPAGTSAQRAELIALTQALKMAEGKKLNVYTDSRYAFATAHIHGEIYRRRGLLTSEGKEIKNKDEILALLKALFLPKRLSIIHCPGHQKGHSAEARGNRMADQAARKAAITETPDTSTLLAGKRTADGSEFEKRTADGSEFESPKKKAKVE

SEQ ID NO: 7732 - protein, 2118 aa, synthetic construct; identical to SEQ ID NO: 7731

SEQ ID NO: 7733 - protein, 2138 aa, synthetic construct
MPAAKRVKLDGGDKKYSIGLDIGTNSVGWAVITDEYKVPSKKFKVLGNTDRHSIKKNLIGALLFDSGETAEATRLKRTARRRYTRRKNRICYLQEIFSNEMAKVDDSFFHRLEESFLVEEDKKHERHPIFGNIVDEVAYHEKYPTIYHLRKKLVDSTDKADLRLIYLALAHMIKFRGHFLIEGDLNPDNSDVDKLFIQLVQTYNQLFEENPINASGVDAKAILSARLSKSRRLENLIAQLPGEKKNGLFGNLIALSLGLTPNFKSNFDLAEDAKLQLSKDTYDDDLDNLLAQIGDQYADLFLAAKNLSDAILLSDILRVNTEITKAPLSASMIKRYDEHHQDLTLLKALVRQQLPEKYKEIFFDQSKNGYAGYIDGGASQEEFYKFIKPILEKMDGTEELLVKLNREDLLRKQRTFDNGSIPHQIHLGELHAILRRQEDFYPFLKDNREKIEKILTFRIPYYVGPLARGNSRFAWMTRKSEETITPWNFEEVVDKGASAQSFIERMTNFDKNLPNEKVLPKHSLLYEYFTVYNELTKVKYVTEGMRKPAFLSGEQKKAIVDLLFKTNRKVTVKQLKEDYFKKIECFDSVEISGVEDRFNASLGTYHDLLKIIKDKDFLDNEENEDILEDIVLTLTLFEDREMIEERLKTYAHLFDDKVMKQLKRRRYTGWGRLSRKLINGIRDKQSGKTILDFLKSDGFANRNFMQLIHDDSLTFKEDIQKAQVSGQGDSLHEHIANLAGSPAIKKGILQTVKVVDELVKVMGRHKPENIVIEMARENQTTQKGQKNSRERMKRIEEGIKELGSQILKEHPVENTQLQNEKLYLYYLQNGRDMYVDQELDINRLSDYDVDHIVPQSFLKDDSIDNKVLTRSDKARGKSDNVPSEEVVKKMKNYWRQLLNAKLITQRKFDNLTKAERGGLSELDKAGFIKRQLVETRQITKHVAQILDSRMNTKYDENDKLIREVKVITLKSKLVSDFRKDFQFYKVREINNYHHAHDAYLNAVVGTALIKKYPKLESEFVYGDYKVYDVRKMIAKSEQEIGKATAKYFFYSNIMNFFKTEITLANGEIRKRPLIETNGETGEIVWDKGRDFATVRKVLSMPQVNIVKKTEVQTGGFSKESILPKRNSDKLIARKKDWDPKKYGGFDSPTVAYSVLVVAKVEKGKSKKLKSVKELLGITIMERSSFEKNPIDFLEAKGYKEVKKDLIIKLPKYSLFELENGRKRMLASAGELQKGNELALPSKYVNFLYLASHYEKLKGSPEDNEQKQLFVEQHKHYLDEIIEQISEFSKRVILADANLDKVLSAYNKHRDKPIREQAENIIHLFTLTNLGAPAAFKYFDTTIDRKRYTSTKEVLDATLIHQSITGLYETRIDLSQLGGDGGSGGSSGGSSGSETPGTSESATPESSGGSSGGSSGGWVQEISDSRPMLHIYLNGRRFLGLLNTGADKTCIAGRDWPANWPIHQTESSLQGLGMACGVARSSQPLRWQHEDKSGIIHPFVIPTLPFTLWGRDIMKDIKVRLMTDSPDDSQDLMIGAIESNLFADQISWKSDQPVWLNQWPLKQEKLQALQQLVTEQLQLGHLEESNSPWNTPVFVIKKKSGKWRLLQDLRAVNATMHDMGALQPGLPSPVAVPKGWEIIIIDLQDCFFNIKLHPEDCKRFAFSVPSPNFKRPYQRFQWKVLPQGMKNSPTLCQKFVDKAILTVRDKYQDSYIVHYMDDILLAHPSRSIVDEILTSMIQALNKHGLVVSTEKIQKYDNLKYLGTHIQGDSVSYQKLQIRTDKLRTLNDFQKLLGNINWIRPFLKLTTGELKPLFEILNGDSNPISTRKLTPEACKALQLMNERLSTARVKRLDLSQPWSLCILKTEYTPTACLWQDGVVEWIHLPHISPKVITPYDIFCTQLIIKGRHRSKELFSKDPDYIVVPYTKVQFDLLLQEKEDWPISLLGFLGEVHFHLPKDPLLTFTLQTAIIFPHMTSTTPLEKGIVIFTDGSANGRSVTYIQGREPIIKENTQNTAQQAEIVAVITAFEEVSQPFNLYTDSKYVTGLFPEIETATLSPRTKIYTELKHLQRLIHKRQEKFYIGHIRGHTGLPGPLAQGNAYADSLTRILTAGKRTADGSEFEKRTADGSEFESPKKKAKVE

SEQ ID NO: 7734 - protein, 2110 aa, synthetic construct
MPAAKRVKLDGGDKKYSIGLDIGTNSVGWAVITDEYKVPSKKFKVLGNTDRHSIKKNLIGALLFDSGETAEATRLKRTARRRYTRRKNRICYLQEIFSNEMAKVDDSFFHRLEESFLVEEDKKHERHPIFGNIVDEVAYHEKYPTIYHLRKKLVDSTDKADLRLIYLALAHMIKFRGHFLIEGDLNPDNSDVDKLFIQLVQTYNQLFEENPINASGVDAKAILSARLSKSRRLENLIAQLPGEKKNGLFGNLIALSLGLTPNFKSNFDLAEDAKLQLSKDTYDDDLDNLLAQIGDQYADLFLAAKNLSDAILLSDILRVNTEITKAPLSASMIKRYDEHHQDLTLLKALVRQQLPEKYKEIFFDQSKNGYAGYIDGGASQEEFYKFIKPILEKMDGTEELLVKLNREDLLRKQRTFDNGSIPHQIHLGELHAILRRQEDFYPFLKDNREKIEKILTFRIPYYVGPLARGNSRFAWMTRKSEETITPWNFEEVVDKGASAQSFIERMTNFDKNLPNEKVLPKHSLLYEYFTVYNELTKVKYVTEGMRKPAFLSGEQKKAIVDLLFKTNRKVTVKQLKEDYFKKIECFDSVEISGVEDRFNASLGTYHDLLKIIKDKDFLDNEENEDILEDIVLTLTLFEDREMIEERLKTYAHLFDDKVMKQLKRRRYTGWGRLSRKLINGIRDKQSGKTILDFLKSDGFANRNFMQLIHDDSLTFKEDIQKAQVSGQGDSLHEHIANLAGSPAIKKGILQTVKVVDELVKVMGRHKPENIVIEMARENQTTQKGQKNSRERMKRIEEGIKELGSQILKEHPVENTQLQNEKLYLYYLQNGRDMYVDQELDINRLSDYDVDHIVPQSFLKDDSIDNKVLTRSDKARGKSDNVPSEEVVKKMKNYWRQLLNAKLITQRKFDNLTKAERGGLSELDKAGFIKRQLVETRQITKHVAQILDSRMNTKYDENDKLIREVKVITLKSKLVSDFRKDFQFYKVREINNYHHAHDAYLNAVVGTALIKKYPKLESEFVYGDYKVYDVRKMIAKSEQEIGKATAKYFFYSNIMNFFKTEITLANGEIRKRPLIETNGETGEIVWDKGRDFATVRKVLSMPQVNIVKKTEVQTGGFSKESILPKRNSDKLIARKKDWDPKKYGGFDSPTVAYSVLVVAKVEKGKSKKLKSVKELLGITIMERSSFEKNPIDFLEAKGYKEVKKDLIIKLPKYSLFELENGRKRMLASAGELQKGNELALPSKYVNFLYLASHYEKLKGSPEDNEQKQLFVEQHKHYLDEIIEQISEFSKRVILADANLDKVLSAYNKHRDKPIREQAENIIHLFTLTNLGAPAAFKYFDTTIDRKRYTSTKEVLDATLIHQSITGLYETRIDLSQLGGDGGSGGSSGGSSGSETPGTSESATPESSGGSSGGSSGGLDDEYRLYSPLVKPDQNIQFWLEQFPQAWAETAGMGLAKQVPPQVIQLKASATPVSVRQYPLSKEAQEGIRPHVQRLIQQGILVPVQSPWNTPLLPVRKPGTNDYRPVQDLREVNKRVQDIHPTVPNPYNLLCALPPQRSWYTVLDLKDAFFCLRLHPTSQPLFAFEWRDPGTGRTGQLTWTRLPQGFKNSPTIFNEALHRDLANFRIQHPQVTLLQYVDDLLLAGATKQDCLEGTKALLLELSDLGYRASAKKAQICRREVTYLGYSLRDGQRWLTEARKKTVVQIPAPTTAKQVREFLGKAGFCRLFIPGFATLAAPLYPLTKPKGEFSWAPEHQKAFDAIKKALLSAPALALPDVTKPFTLYVDERKGVARGVLTQTLGPWRRPVAYLSKKLDPVASGWPVCLKAIAAVAILVKDADKLTLGQNITVIAPHALENIVRQPPDRWMTNARMTHYQSLLLTERVTFAPPAALNPATLLPEETDEPVTHDCHQLLIEETGVRKDLTDIPLTGEVLTWFTDGSSYVVEGKRMAGAAVVDGTRTIWASSLPEGTSAQKAELMALTQALRLAEGKSINIYTDSRYAFATAHVHGAIYKQRGWLTSAGREIKNKEEILSLLEALHLPKRLAIIHCPGHQKAKDPISRGNQMADRVAKQAAQGVNLLPAGKRTADGSEFEKRTADGSEFESPKKKAKVE

SEQ ID NO: 7735 - protein, 2110 aa, synthetic construct; identical to SEQ ID NO: 7734

SEQ ID NO: 7736 - protein, 2109 aa, synthetic construct
MPAAKRVKLDGGDKKYSIGLDIGTNSVGWAVITDEYKVPSKKFKVLGNTDRHSIKKNLIGALLFDSGETAEATRLKRTARRRYTRRKNRICYLQEIFSNEMAKVDDSFFHRLEESFLVEEDKKHERHPIFGNIVDEVAYHEKYPTIYHLRKKLVDSTDKADLRLIYLALAHMIKFRGHFLIEGDLNPDNSDVDKLFIQLVQTYNQLFEENPINASGVDAKAILSARLSKSRRLENLIAQLPGEKKNGLFGNLIALSLGLTPNFKSNFDLAEDAKLQLSKDTYDDDLDNLLAQIGDQYADLFLAAKNLSDAILLSDILRVNTEITKAPLSASMIKRYDEHHQDLTLLKALVRQQLPEKYKEIFFDQSKNGYAGYIDGGASQEEFYKFIKPILEKMDGTEELLVKLNREDLLRKQRTFDNGSIPHQIHLGELHAILRRQEDFYPFLKDNREKIEKILTFRIPYYVGPLARGNSRFAWMTRKSEETITPWNFEEVVDKGASAQSFIERMTNFDKNLPNEKVLPKHSLLYEYFTVYNELTKVKYVTEGMRKPAFLSGEQKKAIVDLLFKTNRKVTVKQLKEDYFKKIECFDSVEISGVEDRFNASLGTYHDLLKIIKDKDFLDNEENEDILEDIVLTLTLFEDREMIEERLKTYAHLFDDKVMKQLKRRRYTGWGRLSRKLINGIRDKQSGKTILDFLKSDGFANRNFMQLIHDDSLTFKEDIQKAQVSGQGDSLHEHIANLAGSPAIKKGILQTVKVVDELVKVMGRHKPENIVIEMARENQTTQKGQKNSRERMKRIEEGIKELGSQILKEHPVENTQLQNEKLYLYYLQNGRDMYVDQELDINRLSDYDVDHIVPQSFLKDDSIDNKVLTRSDKARGKSDNVPSEEVVKKMKNYWRQLLNAKLITQRKFDNLTKAERGGLSELDKAGFIKRQLVETRQITKHVAQILDSRMNTKYDENDKLIREVKVITLKSKLVSDFRKDFQFYKVREINNYHHAHDAYLNAVVGTALIKKYPKLESEFVYGDYKVYDVRKMIAKSEQEIGKATAKYFFYSNIMNFFKTEITLANGEIRKRPLIETNGETGEIVWDKGRDFATVRKVLSMPQVNIVKKTEVQTGGFSKESILPKRNSDKLIARKKDWDPKKYGGFDSPTVAYSVLVVAKVEKGKSKKLKSVKELLGITIMERSSFEKNPIDFLEAKGYKEVKKDLIIKLPKYSLFELENGRKRMLASAGELQKGNELALPSKYVNFLYLASHYEKLKGSPEDNEQKQLFVEQHKHYLDEIIEQISEFSKRVILADANLDKVLSAYNKHRDKPIREQAENIIHLFTLTNLGAPAAFKYFDTTIDRKRYTSTKEVLDATLIHQSITGLYETRIDLSQLGGDGGSGGSSGGSSGSETPGTSESATPESSGGSSGGSSGGVPWLMKKPLQLTVLVPLHEYQERLLQQTALPKEQKELLQKLFLKYDALWQHWENQVGHRRIKPHNIATGTLAPRPQKQYPINPKAKPSIQIVIDDLLKQGVLIQQNSTMNTPVYPVPKPDGKWRMVLDYREVNKTIPLIAAQNQHSAGILSSIYRGKYKTTLDLTNGFWAHPITPESYWLTAFTWQGKQYCWTRLPQGFLNSPALFTADVVDLLKEIPNVQAYVDDIYISHDDPQEHLEQLEKIFSILLNAGYVVSLKKSEIAQREVEFLGFNITKEGRGLTDTFKQKLLNITPPKDLKQLQSILGLLNFARNFIPNYSELVKPLYTIVANANGKFISWTEDNSNQLQHIISVLNQADNLEERNPETRLIIKVNSSPSAGYIRYYNEGSKRPIMYVNYIFSKAEAKFTQTEKLLTTMHKGLIKAMDLAMGQEILVYSPIVSMTKIQRTPLPERKALPVRWITWMTYLEDPRIQFHYDKSLPELQQIPNVTEDVIAKTKHPSEFAMVFYTDGSAIKHPDVNKSHSAGMGIAQVQFIPEYKIVHQWSIPLGDHTAQLAEIAAVEFACKKALKISGPVLIVTDSFYVAESANKELPYWKSNGFLNNKKKPLRHVSKWKSIAECLQLKPDIIIMHEKGHQQPMTTLHTEGNNLADKLATQGSYVVHAGKRTADGSEFEKRTADGSEFESPKKKAKVE

SEQ ID NO: 7737 - protein, 2109 aa, synthetic construct
MPAAKRVKLDGGDKKYSIGLDIGTNSVGWAVITDEYKVPSKKFKVLGNTDRHSIKKNLIGALLFDSGETAEATRLKRTARRRYTRRKNRICYLQEIFSNEMAKVDDSFFHRLEESFLVEEDKKHERHPIFGNIVDEVAYHEKYPTIYHLRKKLVDSTDKADLRLIYLALAHMIKFRGHFLIEGDLNPDNSDVDKLFIQLVQTYNQLFEENPINASGVDAKAILSARLSKSRRLENLIAQLPGEKKNGLFGNLIALSLGLTPNFKSNFDLAEDAKLQLSKDTYDDDLDNLLAQIGDQYADLFLAAKNLSDAILLSDILRVNTEITKAPLSASMIKRYDEHHQDLTLLKALVRQQLPEKYKEIFFDQSKNGYAGYIDGGASQEEFYKFIKPILEKMDGTEELLVKLNREDLLRKQRTFDNGSIPHQIHLGELHAILRRQEDFYPFLKDNREKIEKILTFRIPYYVGPLARGNSRFAWMTRKSEETITPWNFEEVVDKGASAQSFIERMTNFDKNLPNEKVLPKHSLLYEYFTVYNELTKVKYVTEGMRKPAFLSGEQKKAIVDLLFKTNRKVTVKQLKEDYFKKIECFDSVEISGVEDRFNASLGTYHDLLKIIKDKDFLDNEENEDILEDIVLTLTLFEDREMIEERLKTYAHLFDDKVMKQLKRRRYTGWGRLSRKLINGIRDKQSGKTILDFLKSDGFANRNFMQLIHDDSLTFKEDIQKAQVSGQGDSLHEHIANLAGSPAIKKGILQTVKVVDELVKVMGRHKPENIVIEMARENQTTQKGQKNSRERMKRIEEGIKELGSQILKEHPVENTQLQNEKLYLYYLQNGRDMYVDQELDINRLSDYDVDHIVPQSFLKDDSIDNKVLTRSDKARGKSDNVPSEEVVKKMKNYWRQLLNAKLITQRKFDNLTKAERGGLSELDKAGFIKRQLVETRQITKHVAQILDSRMNTKYDENDKLIREVKVITLKSKLVSDFRKDFQFYKVREINNYHHAHDAYLNAVVGTALIKKYPKLESEFVYGDYKVYDVRKMIAKSEQEIGKATAKYFFYSNIMNFFKTEITLANGEIRKRPLIETNGETGEIVWDKGRDFATVRKVLSMPQVNIVKKTEVQTGGFSKESILPKRNSDKLIARKKDWDPKKYGGFDSPTVAYSVLVVAKVEKGKSKKLKSVKELLGITIMERSSFEKNPIDFLEAKGYKEVKKDLIIKLPKYSLFELENGRKRMLASAGELQKGNELALPSKYVNFLYLASHYEKLKGSPEDNEQKQLFVEQHKHYLDEIIEQISEFSKRVILADANLDKVLSAYNKHRDKPIREQAENIIHLFTLTNLGAPAAFKYFDTTIDRKRYTSTKEVLDATLIHQSITGLYETRIDLSQLGGDGGSGGSSGGSSGSETPGTSESATPESSGGSSGGSSGGVPWLMKKPLQLTVLVPLHEYQERLLQQTALPKEQKELLQKLFLKYDALWQHWENQVGHRRIKPHNIATGTLAPRPQKQYPINPKAKPSIQIVIDDLLKQGVLIQQNSTMNTPVYPVPKPDGKWRMVLDYREVNKTIPLIAAQNQHSAGILSSIYRGKYKTTLDLTNGFWAHPITPESYWLTAFTWQGKQYCWTRLPQGFLNSPALFNADVVDLLKEIPNVQAYVDDIYISHDDPQEHLEQLEKIFSILLNAGYVVSLKKSEIAQREVEFLGFNITKEGRGLTDTFKQKLLNITPPKDLKQLQSILGLLNFARNFIPNYSELVKPLYTIVAPANGKFISWTEDNSNQLQHIISVLNQADNLEERNPETRLIIKVNSSPSAGYIRYYNEGSKRPIMYVNYIFSKAEAKFTQTEKLLTTMHKGLIKAMDLAMGQEILVYSPIVSMTKIQRTPLPERKALPVRWITWMTYLEDPRIQFHYDKSLPELQQIPNVTEDVIAKTKHPSEFAMVFYTDGSAIKHPDVNKSHSAGMGIAQVQFIPEYKIVHQWSIPLGDHTAQLAEIAAVEFACKKALKISGPVLIVTDSFYVAESANKELPYWKSNGFLNNKKKPLRHVSKWKSIAECLQLKPDIIIMHEKGHQQPMTTLHTEGNNLADKLATQGSYVVHAGKRTADGSEFEKRTADGSEFESPKKKAKVE

SEQ ID NO: 7738 - protein, 2198 aa, synthetic construct
MPAAKRVKLDGGDKKYSIGLDIGTNSVGWAVITDEYKVPSKKFKVLGNTDRHSIKKNLIGALLFDSGETAEATRLKRTARRRYTRRKNRICYLQEIFSNEMAKVDDSFFHRLEESFLVEEDKKHERHPIFGNIVDEVAYHEKYPTIYHLRKKLVDSTDKADLRLIYLALAHMIKFRGHFLIEGDLNPDNSDVDKLFIQLVQTYNQLFEENPINASGVDAKAILSARLSKSRRLENLIAQLPGEKKNGLFGNLIALSLGLTPNFKSNFDLAEDAKLQLSKDTYDDDLDNLLAQIGDQYADLFLAAKNLSDAILLSDILRVNTEITKAPLSASMIKRYDEHHQDLTLLKALVRQQLPEKYKEIFFDQSKNGYAGYIDGGASQEEFYKFIKPILEKMDGTEELLVKLNREDLLRKQRTFDNGSIPHQIHLGELHAILRRQEDFYPFLKDNREKIEKILTFRIPYYVGPLARGNSRFAWMTRKSEETITPWNFEEVVDKGASAQSFIERMTNFDKNLPNEKVLPKHSLLYEYFTVYNELTKVKYVTEGMRKPAFLSGEQKKAIVDLLFKTNRKVTVKQLKEDYFKKIECFDSVEISGVEDRFNASLGTYHDLLKIIKDKDFLDNEENEDILEDIVLTLTLFEDREMIEERLKTYAHLFDDKVMKQLKRRRYTGWGRLSRKLINGIRDKQSGKTILDFLKSDGFANRNFMQLIHDDSLTFKEDIQKAQVSGQGDSLHEHIANLAGSPAIKKGILQTVKVVDELVKVMGRHKPENIVIEMARENQTTQKGQKNSRERMKRIEEGIKELGSQILKEHPVENTQLQNEKLYLYYLQNGRDMYVDQELDINRLSDYDVDHIVPQSFLKDDSIDNKVLTRSDKARGKSDNVPSEEVVKKMKNYWRQLLNAKLITQRKFDNLTKAERGGLSELDKAGFIKRQLVETRQITKHVAQILDSRMNTKYDENDKLIREVKVITLKSKLVSDFRKDFQFYKVREINNYHHAHDAYLNAVVGTALIKKYPKLESEFVYGDYKVYDVRKMIAKSEQEIGKATAKYFFYSNIMNFFKTEITLANGEIRKRPLIETNGETGEIVWDKGRDFATVRKVLSMPQVNIVKKTEVQTGGFSKESILPKRNSDKLIARKKDWDPKKYGGFDSPTVAYSVLVVAKVEKGKSKKLKSVKELLGITIMERSSFEKNPIDFLEAKGYKEVKKDLIIKLPKYSLFELENGRKRMLASAGELQKGNELALPSKYVNFLYLASHYEKLKGSPEDNEQKQLFVEQHKHYLDEIIEQISEFSKRVILADANLDKVLSAYNKHRDKPIREQAENIIHLFTLTNLGAPAAFKYFDTTIDRKRYTSTKEVLDATLIHQSITGLYETRIDLSQLGGDGGSGGSSGGSSGSETPGTSESATPESSGGSSGGSSGGMDPLQLLQPLEAEIKGTKLKAHWNSGATITCVPEAFLEDERPIQTMLIKTIHGEKQQDVYYLTFKVQGRKVEAEVLASPYDYILLNPSDVPWLMKKPLQLTVLVPLHEYQERLLQQTALPKEQKELLQKLFLKYDALWQHWENQVGHRRIKPHNIATGTLAPRPQKQYPINPKAKPSIQIVIDDLLKQGVLIQQNSTMNTPVYPVPKPDGKWRMVLDYREVNKTIPLIAAQNQHSAGILSSIYRGKYKTTLDLTNGFWAHPITPESYWLTAFTWQGKQYCWTRLPQGFLNSPALFNADVVDLLKEIPNVQAYVDDIYISHDDPQEHLEQLEKIFSILLNAGYVVSLKKSEIAQREVEFLGFNITKEGRGLTDTFKQKLLNITPPKDLKQLQSILGKLNFARNFIPNYSELVKPLYTIVAPANGKFISWTEDNSNQLQHIISVLNQADNLEERNPETRLIIKVNSSPSAGYIRYYNEGSKRPIMYVNYIFSKAEAKFTQTEKLLTTMHKGLIKAMDLAMGQEILVYSPIVSMTKIQRTPLPERKALPVRWITWMTYLEDPRIQFHYDKSLPELQQIPNVTEDVIAKTKHPSEFAMVFYTDGSAIKHPDVNKSHSAGMGIAQVQFIPEYKIVHQWSIPLGDHTAQLAEIAAVEFACKKALKISGPVLIVTDSFYVAESANKELPYWKSNGFLNNKKKPLRHVSKWKSIAECLQLKPDIIIMHEKGHQQPMTTLHTEGNNLADKLATQGSYVVHAGKRTADGSEFEKRTADGSEFESPKKKAKVE

SEQ ID NO: 7739 - protein, 2109 aa, synthetic construct
MPAAKRVKLDGGDKKYSIGLDIGTNSVGWAVITDEYKVPSKKFKVLGNTDRHSIKKNLIGALLFDSGETAEATRLKRTARRRYTRRKNRICYLQEIFSNEMAKVDDSFFHRLEESFLVEEDKKHERHPIFGNIVDEVAYHEKYPTIYHLRKKLVDSTDKADLRLIYLALAHMIKFRGHFLIEGDLNPDNSDVDKLFIQLVQTYNQLFEENPINASGVDAKAILSARLSKSRRLENLIAQLPGEKKNGLFGNLIALSLGLTPNFKSNFDLAEDAKLQLSKDTYDDDLDNLLAQIGDQYADLFLAAKNLSDAILLSDILRVNTEITKAPLSASMIKRYDEHHQDLTLLKALVRQQLPEKYKEIFFDQSKNGYAGYIDGGASQEEFYKFIKPILEKMDGTEELLVKLNREDLLRKQRTFDNGSIPHQIHLGELHAILRRQEDFYPFLKDNREKIEKILTFRIPYYVGPLARGNSRFAWMTRKSEETITPWNFEEVVDKGASAQSFIERMTNFDKNLPNEKVLPKHSLLYEYFTVYNELTKVKYVTEGMRKPAFLSGEQKKAIVDLLFKTNRKVTVKQLKEDYFKKIECFDSVEISGVEDRFNASLGTYHDLLKIIKDKDFLDNEENEDILEDIVLTLTLFEDREMIEERLKTYAHLFDDKVMKQLKRRRYTGWGRLSRKLINGIRDKQSGKTILDFLKSDGFANRNFMQLIHDDSLTFKEDIQKAQVSGQGDSLHEHIANLAGSPAIKKGILQTVKVVDELVKVMGRHKPENIVIEMARENQTTQKGQKNSRERMKRIEEGIKELGSQILKEHPVENTQLQNEKLYLYYLQNGRDMYVDQELDINRLSDYDVDHIVPQSFLKDDSIDNKVLTRSDKARGKSDNVPSEEVVKKMKNYWRQLLNAKLITQRKFDNLTKAERGGLSELDKAGFIKRQLVETRQITKHVAQILDSRMNTKYDENDKLIREVKVITLKSKLVSDFRKDFQFYKVREINNYHHAHDAYLNAVVGTALIKKYPKLESEFVYGDYKVYDVRKMIAKSEQEIGKATAKYFFYSNIMNFFKTEITLANGEIRKRPLIETNGETGEIVWDKGRDFATVRKVLSMPQVNIVKKTEVQTGGFSKESILPKRNSDKLIARKKDWDPKKYGGFDSPTVAYSVLVVAKVEKGKSKKLKSVKELLGITIMERSSFEKNPIDFLEAKGYKEVKKDLIIKLPKYSLFELENGRKRMLASAGELQKGNELALPSKYVNFLYLASHYEKLKGSPEDNEQKQLFVEQHKHYLDEIIEQISEFSKRVILADANLDKVLSAYNKHRDKPIREQAENIIHLFTLTNLGAPAAFKYFDTTIDRKRYTSTKEVLDATLIHQSITGLYETRIDLSQLGGDGGSGGSSGGSSGSETPGTSESATPESSGGSSGGSSGGIPWLMKKPLQLTTLVPLQEYEERLLKQTMLTGSYKEKLQSLFLKYDALWQHWENQVGHRRIKPHHIATGTVNPRPQKQYPINPKAKASIQTVINDLLKQGVLIQQNSIMNTPVYPVPKPDGKWRMVLDYREVNKTIPLIAAQNQHSAGILSSIFRGKYKTTLDLSNGFWAHSITPESYWLTAFTWLGQQYCWTRLPQGFLNSPALFNADVVDLLKEVPNVQVYVDDIYISHDDPREHLEQLEKVFSLLLNAGYVVSLKKSEIAQHEVEFLGFNITKEGRGLTETFKQKLLNITPPRDLKQLQSILGLLNFARNFIPNFSELVKPLYNIIATAPGKYITWTTDNSQQLQNIISMLNSAENLEERNPEVRLIMKVNTSPSAGYIRFYNEFAKRPIMYLNYVYTKAEVKFTNTEKLLTTIHKGLIKALDLGMGQEILVYSPIVSMTKIQKTPLPERKALPIRWITWMSYLEDPRIQFHYDKTLPELQQVPTVTDDIIAKIKHPSEFSMVFYTDGSAIKHPNVNKSHNAGMGIAQVQFKPEFTVINTWSIPLGDHTAQLAEVAAVEFACKKALKIDGPVLIVTDSFYVAESVNKELPYWQSNGFFNNKKKPLKHVSKWKSIADCIQLKPDIIIIHEKGHQPTASTFHTEGNNLADKLATQGSYVVNAGKRTADGSEFEKRTADGSEFESPKKKAKVE

SEQ ID NO: 7740 - protein, 2198 aa, synthetic construct
MPAAKRVKLDGGDKKYSIGLDIGTNSVGWAVITDEYKVPSKKFKVLGNTDRHSIKKNLIGALLFDSGETAEATRLKRTARRRYTRRKNRICYLQEIFSNEMAKVDDSFFHRLEESFLVEEDKKHERHPIFGNIVDEVAYHEKYPTIYHLRKKLVDSTDKADLRLIYLALAHMIKFRGHFLIEGDLNPDNSDVDKLFIQLVQTYNQLFEENPINASGVDAKAILSARLSKSRRLENLIAQLPGEKKNGLFGNLIALSLGLTPNFKSNFDLAEDAKLQLSKDTYDDDLDNLLAQIGDQYADLFLAAKNLSDAILLSDILRVNTEITKAPLSASMIKRYDEHHQDLTLLKALVRQQLPEKYKEIFFDQSKNGYAGYIDGGASQEEFYKFIKPILEKMDGTEELLVKLNREDLLRKQRTFDNGSIPHQIHLGELHAILRRQEDFYPFLKDNREKIEKILTFRIPYYVGPLARGNSRFAWMTRKSEETITPWNFEEVVDKGASAQSFIERMTNFDKNLPNEKVLPKHSLLYEYFTVYNELTKVKYVTEGMRKPAFLSGEQKKAIVDLLFKTNRKVTVKQLKEDYFKKIECFDSVEISGVEDRFNASLGTYHDLLKIIKDKDFLDNEENEDILEDIVLTLTLFEDREMIEERLKTYAHLFDDKVMKQLKRRRYTGWGRLSRKLINGIRDKQSGKTILDFLKSDGFANRNFMQLIHDDSLTFKEDIQKAQVSGQGDSLHEHIANLAGSPAIKKGILQTVKVVDELVKVMGRHKPENIVIEMARENQTTQKGQKNSRERMKRIEEGIKELGSQILKEHPVENTQLQNEKLYLYYLQNGRDMYVDQELDINRLSDYDVDHIVPQSFLKDDSIDNKVLTRSDKARGKSDNVPSEEVVKKMKNYWRQLLNAKLITQRKFDNLTKAERGGLSELDKAGFIKRQLVETRQITKHVAQILDSRMNTKYDENDKLIREVKVITLKSKLVSDFRKDFQFYKVREINNYHHAHDAYLNAVVGTALIKKYPKLESEFVYGDYKVYDVRKMIAKSEQEIGKATAKYFFYSNIMNFFKTEITLANGEIRKRPLIETNGETGEIVWDKGRDFATVRKVLSMPQVNIVKKTEVQTGGFSKESILPKRNSDKLIARKKDWDPKKYGGFDSPTVAYSVLVVAKVEKGKSKKLKSVKELLGITIMERSSFEKNPIDFLEAKGYKEVKKDLIIKLPKYSLFELENGRKRMLASAGELQKGNELALPSKYVNFLYLASHYEKLKGSPEDNEQKQLFVEQHKHYLDEIIEQISEFSKRVILADANLDKVLSAYNKHRDKPIREQAENIIHLFTLTNLGAPAAFKYFDTTIDRKRYTSTKEVLDATLIHQSITGLYETRIDLSQLGGDGGSGGSSGGSSGSETPGTSESATPESSGGSSGGSSGGMDPLQLLQPLEAEIKGTKLKAHWNSGATITCVPQAFLEEEVPIKNIWIKTIHGEKEQPVYYLTFKIQGRKVEAEVISSPYDYILVSPSDIPWLMKKPLQLTTLVPLQEYEERLLKQTMLTGSYKEKLQSLFLKYDALWQHWENQVGHRRIKPHHIATGTVNPRPQKQYPINPKAKASIQTVINDLLKQGVLIQQNSIMNTPVYPVPKPDGKWRMVLDYREVNKTIPLIAAQNQHSAGILSSIFRGKYKTTLDLSNGFWAHSITPESYWLTAFTWLGQQYCWTRLPQGFLNSPALFNADVVDLLKEVPNVQVYVDDIYISHDDPREHLEQLEKVFSLLLNAGYVVSLKKSEIAQHEVEFLGFNITKEGRGLTETFKQKLLNITPPRDLKQLQSILGLLNFARNFIPNFSELVKPLYNIIATAPGKYITWTTDNSQQLQNIISMLNSAENLEERNPEVRLIMKVNTSPSAGYIRFYNEFAKRPIMYLNYVYTKAEVKFTNTEKLLTTIHKGLIKALDLGMGQEILVYSPIVSMTKIQKTPLPERKALPIRWITWMSYLEDPRIQFHYDKTLPELQQVPTVTDDIIAKIKHPSEFSMVFYTDGSAIKHPNVNKSHNAGMGIAQVQFKPEFTVINTWSIPLGDHTAQLAEVAAVEFACKKALKIDGPVLIVTDSFYVAESVNKELPYWQSNGFFNNKKKPLKHVSKWKSIADCIQLKPDIIIIHEKGHQPTASTFHTEGNNLADKLATQGSYVVNAGKRTADGSEFEKRTADGSEFESPKKKAKVE

SEQ ID NO: 7741 - protein, 2116 aa, synthetic construct
MPAAKRVKLDGGDKKYSIGLDIGTNSVGWAVITDEYKVPSKKFKVLGNTDRHSIKKNLIGALLFDSGETAEATRLKRTARRRYTRRKNRICYLQEIFSNEMAKVDDSFFHRLEESFLVEEDKKHERHPIFGNIVDEVAYHEKYPTIYHLRKKLVDSTDKADLRLIYLALAHMIKFRGHFLIEGDLNPDNSDVDKLFIQLVQTYNQLFEENPINASGVDAKAILSARLSKSRRLENLIAQLPGEKKNGLFGNLIALSLGLTPNFKSNFDLAEDAKLQLSKDTYDDDLDNLLAQIGDQYADLFLAAKNLSDAILLSDILRVNTEITKAPLSASMIKRYDEHHQDLTLLKALVRQQLPEKYKEIFFDQSKNGYAGYIDGGASQEEFYKFIKPILEKMDGTEELLVKLNREDLLRKQRTFDNGSIPHQIHLGELHAILRRQEDFYPFLKDNREKIEKILTFRIPYYVGPLARGNSRFAWMTRKSEETITPWNFEEVVDKGASAQSFIERMTNFDKNLPNEKVLPKHSLLYEYFTVYNELTKVKYVTEGMRKPAFLSGEQKKAIVDLLFKTNRKVTVKQLKEDYFKKIECFDSVEISGVEDRFNASLGTYHDLLKIIKDKDFLDNEENEDILEDIVLTLTLFEDREMIEERLKTYAHLFDDKVMKQLKRRRYTGWGRLSRKLINGIRDKQSGKTILDFLKSDGFANRNFMQLIHDDSLTFKEDIQKAQVSGQGDSLHEHIANLAGSPAIKKGILQTVKVVDELVKVMGRHKPENIVIEMARENQTTQKGQKNSRERMKRIEEGIKELGSQILKEHPVENTQLQNEKLYLYYLQNGRDMYVDQELDINRLSDYDVDHIVPQSFLKDDSIDNKVLTRSDKARGKSDNVPSEEVVKKMKNYWRQLLNAKLITQRKFDNLTKAERGGLSELDKAGFIKRQLVETRQITKHVAQILDSRMNTKYDENDKLIREVKVITLKSKLVSDFRKDFQFYKVREINNYHHAHDAYLNAVVGTALIKKYPKLESEFVYGDYKVYDVRKMIAKSEQEIGKATAKYFFYSNIMNFFKTEITLANGEIRKRPLIETNGETGEIVWDKGRDFATVRKVLSMPQVNIVKKTEVQTGGFSKESILPKRNSDKLIARKKDWDPKKYGGFDSPTVAYSVLVVAKVEKGKSKKLKSVKELLGITIMERSSFEKNPIDFLEAKGYKEVKKDLIIKLPKYSLFELENGRKRMLASAGELQKGNELALPSKYVNFLYLASHYEKLKGSPEDNEQKQLFVEQHKHYLDEIIEQISEFSKRVILADANLDKVLSAYNKHRDKPIREQAENIIHLFTLTNLGAPAAFKYFDTTIDRKRYTSTKEVLDATLIHQSITGLYETRIDLSQLGGDGGSGGSSGGSSGSETPGTSESATPESSGGSSGGSSGGVLNLEEEYRLHEKPVPSSIDPSWLQLFPTVWAERAGMGLANQVPPVVVELRSGASPVAVRQYPMSKEAREGIRPHIQRFLDLGVLVPCQSPWNTPLLPVKKPGTNDYRPVQDLREINKRVQDIHPTVPNPYNLLSSLPPSHTWYSVLDLKDAFFCLKLHPNSQPLFAFEWRDPEKGNTGQLTWTRLPQGFKNSPTLFDEALHRDLAPFRALNPQVVLLQYVDDLLVAAPTYRDCKEGTQKLLQELSKLGYRVSAKKAQLCQKEVTYLGYLLKEGKRWLTPARKATVMKIPPPTTPRQVREFLGTAGFCRLWIPGFASLAAPLYPLTKESIPFIWTEEHQKAFDRIKEALLSAPALALPDLTKPFTLYVDERAGVARGVLTQTLGPWRRPVAYLSKKLDPVASGWPTCLKAVAAVALLLKDADKLTLGQNVTVIASHSLESIVRQPPDRWMTNARMTHYQSLLLNERVSFAPPAVLNPATLLPVESEATPVHRCSEILAEETGTRRDLKDQPLPGVPAWYTDGSSFIAEGKRRAGAAIVDGKRTVWASSLPEGTSAQKAELVALTQALRLAEGKDINIYTDSRYAFATAHIHGAIYKQRGLLTSAGKDIKNKEEILALLEAIHLPKRVAIIHCPGHQKGNDPVATGNRRADEAAKQAALSTRVLAETTKPAGKRTADGSEFEKRTADGSEFESPKKKAKVE

SEQ ID NO: 7742 - protein, 2116 aa, synthetic construct
MPAAKRVKLDGGDKKYSIGLDIGTNSVGWAVITDEYKVPSKKFKVLGNTDRHSIKKNLIGALLFDSGETAEATRLKRTARRRYTRRKNRICYLQEIFSNEMAKVDDSFFHRLEESFLVEEDKKHERHPIFGNIVDEVAYHEKYPTIYHLRKKLVDSTDKADLRLIYLALAHMIKFRGHFLIEGDLNPDNSDVDKLFIQLVQTYNQLFEENPINASGVDAKAILSARLSKSRRLENLIAQLPGEKKNGLFGNLIALSLGLTPNFKSNFDLAEDAKLQLSKDTYDDDLDNLLAQIGDQYADLFLAAKNLSDAILLSDILRVNTEITKAPLSASMIKRYDEHHQDLTLLKALVRQQLPEKYKEIFFDQSKNGYAGYIDGGASQEEFYKFIKPILEKMDGTEELLVKLNREDLLRKQRTFDNGSIPHQIHLGELHAILRRQEDFYPFLKDNREKIEKILTFRIPYYVGPLARGNSRFAWMTRKSEETITPWNFEEVVDKGASAQSFIERMTNFDKNLPNEKVLPKHSLLYEYFTVYNELTKVKYVTEGMRKPAFLSGEQKKAIVDLLFKTNRKVTVKQLKEDYFKKIECFDSVEISGVEDRFNASLGTYHDLLKIIKDKDFLDNEENEDILEDIVLTLTLFEDREMIEERLKTYAHLFDDKVMKQLKRRRYTGWGRLSRKLINGIRDKQSGKTILDFLKSDGFANRNFMQLIHDDSLTFKEDIQKAQVSGQGDSLHEHIANLAGSPAIKKGILQTVKVVDELVKVMGRHKPENIVIEMARENQTTQKGQKNSRERMKRIEEGIKELGSQILKEHPVENTQLQNEKLYLYYLQNGRDMYVDQELDINRLSDYDVDHIVPQSFLKDDSIDNKVLTRSDKARGKSDNVPSEEVVKKMKNYWRQLLNAKLITQRKFDNLTKAERGGLSELDKAGFIKRQLVETRQITKHVAQILDSRMNTKYDENDKLIREVKVITLKSKLVSDFRKDFQFYKVREINNYHHAHDAYLNAVVGTALIKKYPKLESEFVYGDYKVYDVRKMIAKSEQEIGKATAKYFFYSNIMNFFKTEITLANGEIRKRPLIETNGETGEIVWDKGRDFATVRKVLSMPQVNIVKKTEVQTGGFSKESILPKRNSDKLIARKKDWDPKKYGGFDSPTVAYSVLVVAKVEKGKSKKLKSVKELLGITIMERSSFEKNPIDFLEAKGYKEVKKDLIIKLPKYSLFELENGRKRMLASAGELQKGNELALPSKYVNFLYLASHYEKLKGSPEDNEQKQLFVEQHKHYLDEIIEQISEFSKRVILADANLDKVLSAYNKHRDKPIREQAENIIHLFTLTNLGAPAAFKYFDTTIDRKRYTSTKEVLDATLIHQSITGLYETRIDLSQLGGDGGSGGSSGGSSGSETPGTSESATPESSGGSSGGSSGGVLNLEEEYRLHEKPVPSSIDPSWLQLFPTVWAERAGMGLANQVPPVVVELRSGASPVAVRQYPMSKEAREGIRPHIQRFLDLGVLVPCQSPWNTPLLPVKKPGTNDYRPVQDLREINKRVQDIHPTVPNPYNLLSSLPPSHTWYSVLDLKDAFFCLKLHPNSQPLFAFEWRDPEKGNTGQLTWTRLPQGFKNSPTLFNEALHRDLAPFRALNPQVVLLQYVDDLLVAAPTYRDCKEGTQKLLQELSKLGYRVSAKKAQLCQKEVTYLGYLLKEGKRWLTPARKATVMKIPPPTTPRQVREFLGTAGFCRLWIPGFASLAAPLYPLTKPSIPFIWTEEHQKAFDRIKEALLSAPALALPDLTKPFTLYVDERAGVARGVLTQTLGPWRRPVAYLSKKLDPVASGWPTCLKAVAAVALLLKDADKLTLGQNVTVIASHSLESIVRQPPDRWMTNARMTHYQSLLLNERVSFAPPAVLNPATLLPVESEATPVHRCSEILAEETGTRRDLKDQPLPGVPAWYTDGSSFIAEGKRRAGAAIVDGKRTVWASSLPEGTSAQKAELVALTQALRLAEGKDINIYTDSRYAFATAHIHGAIYKQRGWLTSAGKDIKNKEEILALLEAIHLPKRVAIIHCPGHQKGNDPVATGNRRADEAAKQAALSTRVLAETTKPAGKRTADGSEFEKRTADGSEFESPKKKAKVE

SEQ ID NO: 7743 - protein, 2116 aa, synthetic construct
MPAAKRVKLDGGDKKYSIGLDIGTNSVGWAVITDEYKVPSKKFKVLGNTDRHSIKKNLIGALLFDSGETAEATRLKRTARRRYTRRKNRICYLQEIFSNEMAKVDDSFFHRLEESFLVEEDKKHERHPIFGNIVDEVAYHEKYPTIYHLRKKLVDSTDKADLRLIYLALAHMIKFRGHFLIEGDLNPDNSDVDKLFIQLVQTYNQLFEENPINASGVDAKAILSARLSKSRRLENLIAQLPGEKKNGLFGNLIALSLGLTPNFKSNFDLAEDAKLQLSKDTYDDDLDNLLAQIGDQYADLFLAAKNLSDAILLSDILRVNTEITKAPLSASMIKRYDEHHQDLTLLKALVRQQLPEKYKEIFFDQSKNGYAGYIDGGASQEEFYKFIKPILEKMDGTEELLVKLNREDLLRKQRTFDNGSIPHQIHLGELHAILRRQEDFYPFLKDNREKIEKILTFRIPYYVGPLARGNSRFAWMTRKSEETITPWNFEEVVDKGASAQSFIERMTNFDKNLPNEKVLPKHSLLYEYFTVYNELTKVKYVTEGMRKPAFLSGEQKKAIVDLLFKTNRKVTVKQLKEDYFKKIECFDSVEISGVEDRFNASLGTYHDLLKIIKDKDFLDNEENEDILEDIVLTLTLFEDREMIEERLKTYAHLFDDKVMKQLKRRRYTGWGRLSRKLINGIRDKQSGKTILDFLKSDGFANRNFMQLIHDDSLTFKEDIQKAQVSGQGDSLHEHIANLAGSPAIKKGILQTVKVVDELVKVMGRHKPENIVIEMARENQTTQKGQKNSRERMKRIEEGIKELGSQILKEHPVENTQLQNEKLYLYYLQNGRDMYVDQELDINRLSDYDVDHIVPQSFLKDDSIDNKVLTRSDKARGKSDNVPSEEVVKKMKNYWRQLLNAKLITQRKFDNLTKAERGGLSELDKAGFIKRQLVETRQITKHVAQILDSRMNTKYDENDKLIREVKVITLKSKLVSDFRKDFQFYKVREINNYHHAHDAYLNAVVGTALIKKYPKLESEFVYGDYKVYDVRKMIAKSEQEIGKATAKYFFYSNIMNFFKTEITLANGEIRKRPLIETNGETGEIVWDKGRDFATVRKVLSMPQVNIVKKTEVQTGGFSKESILPKRNSDKLIARKKDWDPKKYGGFDSPTVAYSVLVVAKVEKGKSKKLKSVKELLGITIMERSSFEKNPIDFLEAKGYKEVKKDLIIKLPKYSLFELENGRKRMLASAGELQKGNELALPSKYVNFLYLASHYEKLKGSPEDNEQKQLFVEQHKHYLDEIIEQISEFSKRVILADANLDKVLSAYNKHRDKPIREQAENIIHLFTLTNLGAPAAFKYFDTTIDRKRYTSTKEVLDATLIHQSITGLYETRIDLSQLGGDGGSGGSSGGSSGSETPGTSESATPESSGGSSGGSSGGVLNLEEEYRLHEKPVPSSIDPSWLQLFPTVWAERAGMGLANQVPPVVVELRSGASPVAVRQYPMSKEAREGIRPHIQRFLDLGVLVPCQSPWNTPLLPVKKPGTNDYRPVQDLREINKRVQDIHPTVPNPYNLLSSLPPSHTWYSVLDLKDAFFCLKLHPNSQPLFAFEWRDPEKGNTGQLTWTRLPQGFKNSPTLFNEALHRDLAPFRALNPQVVLLQYVDDLLVAAPTYRDCKEGTQKLLQELSKLGYRVSAKKAQLCQKEVTYLGYLLKEGKRWLTPARKATVMKIPPPTTPRQVREFLGKAGFCRLFIPGFASLAAPLYPLTKPSIPFIWTEEHQKAFDRIKEALLSAPALALPDLTKPFTLYVDERAGVARGVLTQTLGPWRRPVAYLSKKLDPVASGWPTCLKAVAAVALLLKDADKLTLGQNVTVIASHSLESIVRQPPDRWMTNARMTHYQSLLLNERVSFAPPAVLNPATLLPVESEATPVHRCSEILAEETGTRRDLKDQPLPGVPAWYTDGSSFIAEGKRRAGAAIVDGKRTVWASSLPEGTSAQKAELVALTQALRLAEGKDINIYTDSRYAFATAHIHGAIYKQRGWLTSAGKDIKNKEEILALLEAIHLPKRVAIIHCPGHQKGNDPVATGNRRADEAAKQAALSTRVLAETTKPAGKRTADGSEFEKRTADGSEFESPKKKAKVE

SEQ ID NO: 7744-8000 - skipped (257 entries)

SEQ ID NO: 8001 - protein, 673 aa, Reticuloendotheliosis virus
TAPLEEEYRLFLEAPIQNVTLLEQWKREIPKVWAEINPPGLASTQAPIHVQLLSTALPVRVRQYPITLEAKRSLRETIRKFRAAGILRPVHSPWNTPLLPVRKSGTSEYRMVQDLREVNKRVETIHPTVPNPYTLLSLLPPDRIWYSVLDLKDAFFCIPLAPESQLIFAFEWADAEEGESGQLTWTRLPQGFKNSPTLFDEALNRDLQGFRLDHPSVSLLQYVDDLLIAADTQAACLSATRDLLMTLAELGYRVSGKKAQLCQEEVTYLGFKIHKGSRSLSNSRTQAILQIPVPKTKRQVREFLGTIGYCRLWIPGFAELAQPLYAATRGGNDPLVWGEKEEEAFQSLKLALTQPPALALPSLDKPFQLFVEETSGAAKGVLTQALGPWKRPVAYLSKRLDPVAAGWPRCLRAIAAAALLTREASKLTFGQDIEITSSHNLESLLRSPPDKWLTNARITQYQVLLLDPPRVRFKQTAALNPATLLPETDDTLPIHHCLDTLDSLTSTRPDLTDQPLAQAEATLFTDGSSYIRDGKRYAGAAVVTLDSVIWAEPLPIGTSAQKAELIALTKALEWSKDKSVNIYTDSRYAFATLHVHGMIYRERGLLTAGGKAIKNAPEILALLTAVWLPKRVAVMHCKGHQKDDAPTSTGNRRADEVAREVAIRPLSTQATIS

SEQ ID NO: 8002 - protein, 673 aa, synthetic construct
TAPLEEEYRLFLEAPIQNVTLLEQWKREIPKVWAEINPPGLASTQAPIHVQLLSTALPVRVRQYPITLEAKRSLRETIRKFRAAGILRPVHSPWNTPLLPVRKSGTSEYRMVQDLREVNKRVETIHPTVPNPYTLLSLLPPDRIWYSVLDLKDAFFCIPLAPESQLIFAFEWADAEEGESGQLTWTRLPQGFKNSPTLFNEALNRDLQGFRLDHPSVSLLQYVDDLLIAADTQAACLSATRDLLMTLAELGYRVSGKKAQLCQEEVTYLGFKIHKGSRSLSNSRTQAILQIPVPKTKRQVREFLGTIGYCRLWIPGFAELAQPLYAATRPGNDPLVWGEKEEEAFQSLKLALTQPPALALPSLDKPFQLFVEETSGAAKGVLTQALGPWKRPVAYLSKRLDPVAAGWPRCLRAIAAAALLTREASKLTFGQDIEITSSHNLESLLRSPPDKWLTNARITQYQVLLLDPPRVRFKQTAALNPATLLPETDDTLPIHHCLDTLDSLTSTRPDLTDQPLAQAEATLFTDGSSYIRDGKRYAGAAVVTLDSVIWAEPLPIGTSAQKAELIALTKALEWSKDKSVNIYTDSRYAFATLHVHGMIYRERGWLTAGGKAIKNAPEILALLTAVWLPKRVAVMHCKGHQKDDAPTSTGNRRADEVAREVAIRPLSTQATIS

SEQ ID NO: 8003 - protein, 673 aa, synthetic construct
TAPLEEEYRLFLEAPIQNVTLLEQWKREIPKVWAEINPPGLASTQAPIHVQLLSTALPVRVRQYPITLEAKRSLRETIRKFRAAGILRPVHSPWNTPLLPVRKSGTSEYRMVQDLREVNKRVETIHPTVPNPYTLLSLLPPDRIWYSVLDLKDAFFCIPLAPESQLIFAFEWADAEEGESGQLTWTRLPQGFKNSPTLFNEALNRDLQGFRLDHPSVSLLQYVDDLLIAADTQAACLSATRDLLMTLAELGYRVSGKKAQLCQEEVTYLGFKIHKGSRSLSNSRTQAILQIPVPKTKRQVREFLGKIGYCRLFIPGFAELAQPLYAATRPGNDPLVWGEKEEEAFQSLKLALTQPPALALPSLDKPFQLFVEETSGAAKGVLTQALGPWKRPVAYLSKRLDPVAAGWPRCLRAIAAAALLTREASKLTFGQDIEITSSHNLESLLRSPPDKWLTNARITQYQVLLLDPPRVRFKQTAALNPATLLPETDDTLPIHHCLDTLDSLTSTRPDLTDQPLAQAEATLFTDGSSYIRDGKRYAGAAVVTLDSVIWAEPLPIGTSAQKAELIALTKALEWSKDKSVNIYTDSRYAFATLHVHGMIYRERGWLTAGGKAIKNAPEILALLTAVWLPKRVAVMHCKGHQKDDAPTSTGNRRADEVAREVAIRPLSTQATIS

SEQ ID NO: 8004 - protein, 677 aa, synthetic construct
TVSLQDEHRLFDIPVTTSLPDVWLQDFPQAWAETGGLGRAKCQAPIIIDLKPTAVPVSIKQYPMSLEAHMGIRQHIIKFLELGVLRPCRSPWNTPLLPVKKPGTQDYRPVQDLREINKRTVDIHPTVPNPYNLLSTLKPDYSWYTVLDLKDAFFCLPLAPQSQELFAFEWKDPERGISGQLTWTRLPQGFKNSPTLFDEALHRDLTDFRTQHPEVTLLQYVDDLLLAAPTKKACTQGTRHLLQELGEKGYRASAKKAQICQTKVTYLGYILSEGKRWLTPGRIETVARIPPPRNPREVREFLGTAGFCRLWIPGFAELAAPLYALTKESTPFTWQTEHQLAFEALKKALLSAPALGLPDTSKPFTLFLDERQGIAKGVLTQKLGPWKRPVAYLSKKLDPVAAGWPPCLRIMAATAMLVKDSAKLTLGQPLTVITPHTLEAIVRQPPDRWITNARLTHYQALLLDTDRVQFGPPVTLNPATLLPVPENQPSPHDCRQVLAETHGTREDLKDQELPDADHTWYTDGSSYLDSGTRRAGAAVVDGHNTIWAQSLPPGTSAQKAELIALTKALELSKGKKANIYTDSRYAFATAHTHGSIYERRGLLTSEGKEIKNKAEIIALLKALFLPQEVAIIHCPGHQKGQDPVAVGNRQADRVARQAAMAEVLTLATEPDNTSHIT

SEQ ID NO: 8005 - protein, 677 aa, synthetic construct
TVSLQDEHRLFDIPVTTSLPDVWLQDFPQAWAETGGLGRAKCQAPIIIDLKPTAVPVSIKQYPMSLEAHMGIRQHIIKFLELGVLRPCRSPWNTPLLPVKKPGTQDYRPVQDLREINKRTVDIHPTVPNPYNLLSTLKPDYSWYTVLDLKDAFFCLPLAPQSQELFAFEWKDPERGISGQLTWTRLPQGFKNSPTLFNEALHRDLTDFRTQHPEVTLLQYVDDLLLAAPTKKACTQGTRHLLQELGEKGYRASAKKAQICQTKVTYLGYILSEGKRWLTPGRIETVARIPPPRNPREVREFLGTAGFCRLWIPGFAELAAPLYALTKPSTPFTWQTEHQLAFEALKKALLSAPALGLPDTSKPFTLFLDERQGIAKGVLTQKLGPWKRPVAYLSKKLDPVAAGWPPCLRIMAATAMLVKDSAKLTLGQPLTVITPHTLEAIVRQPPDRWITNARLTHYQALLLDTDRVQFGPPVTLNPATLLPVPENQPSPHDCRQVLAETHGTREDLKDQELPDADHTWYTDGSSYLDSGTRRAGAAVVDGHNTIWAQSLPPGTSAQKAELIALTKALELSKGKKANIYTDSRYAFATAHTHGSIYERRGWLTSEGKEIKNKAEIIALLKALFLPQEVAIIHCPGHQKGQDPVAVGNRQADRVARQAAMAEVLTLATEPDNTSHIT

SEQ ID NO: 8006 - protein, 677 aa, synthetic construct
TVSLQDEHRLFDIPVTTSLPDVWLQDFPQAWAETGGLGRAKCQAPIIIDLKPTAVPVSIKQYPMSLEAHMGIRQHIIKFLELGVLRPCRSPWNTPLLPVKKPGTQDYRPVQDLREINKRTVDIHPTVPNPYNLLSTLKPDYSWYTVLDLKDAFFCLPLAPQSQELFAFEWKDPERGISGQLTWTRLPQGFKNSPTLFNEALHRDLTDFRTQHPEVTLLQYVDDLLLAAPTKKACTQGTRHLLQELGEKGYRASAKKAQICQTKVTYLGYILSEGKRWLTPGRIETVARIPPPRNPREVREFLGKAGFCRLFIPGFAELAAPLYALTKPSTPFTWQTEHQLAFEALKKALLSAPALGLPDTSKPFTLFLDERQGIAKGVLTQKLGPWKRPVAYLSKKLDPVAAGWPPCLRIMAATAMLVKDSAKLTLGQPLTVITPHTLEAIVRQPPDRWITNARLTHYQALLLDTDRVQFGPPVTLNPATLLPVPENQPSPHDCRQVLAETHGTREDLKDQELPDADHTWYTDGSSYLDSGTRRAGAAVVDGHNTIWAQSLPPGTSAQKAELIALTKALELSKGKKANIYTDSRYAFATAHTHGSIYERRGWLTSEGKEIKNKAEIIALLKALFLPQEVAIIHCPGHQKGQDPVAVGNRQADRVARQAAMAEVLTLATEPDNTSHIT

SEQ ID NO: 8007 - protein, 576 aa, Bovine leukemia virus
GVLDAPPSHIGLEHLPPPPEVPQFPLNLERLQALQDLVHRSLEAGYISPWDGPGNNPVFPVRKPNGAWRFVHDLRVTNALTKPIPALSPGPPDLTAIPTHLPHIICLDLKDAFFQIPVEDRFRSYFAFTLPTPGGLQPHRRFAWRVLPQGFINSPALFERALQEPLRQVSAAFSQSLLVSYMDDILYVSPTEEQRLQCYQTMAAHLRDLGFQVASEKTRQTPSPVPFLGQMVHERMVTYQSLPTLQISSPISLHQLQTVLGDLQWVSRGTPTTRRPLQLLYSSLKGIDDPRAIIHLSPEQQQGIAELRQALSHNARSRYNEQEPLLAYVHLTRAGSTLVLFQKGAQFPLAYFQTPLTDNQASPWGLLLLLGCQYLQAQALSSYAKTILKYYHNLPKTSLDNWIQSSEDPRVQELLQLWPQISSQGIQPPGPWKTLVTRAEVFLTPQFSPEPIPAALCLFSDGAARRGAYCLWKDHLLDFQAVPAPESAQKGELAGLLAGLAAAPPEPLNIWVDSKYLYSLLRTLVLGAWLQPDPVPSYALLYKSLLRHPAIFVGHVRSHSSASHPIASLNNYVDQL

SEQ ID NO: 8008 - protein, 576 aa, synthetic construct
GVLDAPPSHIGLEHLPPPPEVPQFPLNLERLQALQDLVHRSLEAGYISPWDGPGNNPVFPVRKPNGAWRFVHDLRVTNALTKPIPALSPGPPDLTAIPTHLPHIICLDLKDAFFQIPVEDRFRSYFAFTLPTPGGLQPHRRFAWRVLPQGFINSPALFQRALQEPLRQVSAAFSQSLLVSYMDDILYVSPTEEQRLQCYQTMAAHLRDLGFQVASEKTRQTPSPVPFLGQMVHERMVTYQSLPTLQISSPISLHQLQTVLGDLQWVSRGTPTTRRPLQLLYSSLKPIDDPRAIIHLSPEQQQGIAELRQALSHNARSRYNEQEPLLAYVHLTRAGSTLVLFQKGAQFPLAYFQTPLTDNQASPWGLLLLLGCQYLQAQALSSYAKTILKYYHNLPKTSLDNWIQSSEDPRVQELLQLWPQISSQGIQPPGPWKTLVTRAEVFLTPQFSPEPIPAALCLFSDGAARRGAYCLWKDHLLDFQAVPAPESAQKGELAGLLAGLAAAPPEPLNIWVDSKYLYSLLRTLVLGAWLQPDPVPSYALLYKSLLRHPAIFVGHVRSHSSASHPIASLNNYVDQL

SEQ ID NO: 8009 - protein, 576 aa, Bovine leukemia virus
GVLDTPPSHIGLEHLPPPPEVPQFPLNLERLQALQDLVHRSLEAGYISPWDGPGNNPVFPVRKPNGAWRFVHDLRATNALTKPIPALSPGPPDLTAIPTHPPHIICLDLKDAFFQIPVEDRFRFYLSFTLPSPGGLQPHRRFAWRVLPQGFINSPALFERALQEPLRQVSAAFSQSLLVSYMDDILYASPTEEQRSQCYQALAARLRDLGFQVASEKTSQTPSPVPFLGQMVHEQIVTYQSLPTLQISSPISLHQLQAVLGDLQWVSRGTPTTRRPLQLLYSSLKRHHDPRAIIQLSPEQLQGIAELRQALSHNARSRYNEQEPLLAYVHLTRAGSTLVLFQKGAQFPLAYFQTPLTDNQASPWGLLLLLGCQYLQTQALSSYAKPILKYYHNLPKTSLDNWIQSSEDPRVQELLQLWPQISSQGIQPPGPWKTLITRAEVFLTPQFSPDPIPAALCLFSDGATGRGAYCLWKDHLLDFQAVPAPESAQKGELAGLLAGLAAAPPEPVNIWVDSKYLYSLLRTLVLGAWLQPDPVPSYALLYKSLLRHPAIVVGHVRSHSSASHPIASLNNYVDQL

SEQ ID NO: 8010 - protein, 576 aa, synthetic construct
GVLDTPPSHIGLEHLPPPPEVPQFPLNLERLQALQDLVHRSLEAGYISPWDGPGNNPVFPVRKPNGAWRFVHDLRATNALTKPIPALSPGPPDLTAIPTHPPHIICLDLKDAFFQIPVEDRFRFYLSFTLPSPGGLQPHRRFAWRVLPQGFINSPALFNRALQEPLRQVSAAFSQSLLVSYMDDILYASPTEEQRSQCYQALAARLRDLGFQVASEKTSQTPSPVPFLGQMVHEQIVTYQSLPTLQISSPISLHQLQAVLGDLQWVSRGTPTTRRPLQLLYSSLKRHHDPRAIIQLSPEQLQGIAELRQALSHNARSRYNEQEPLLAYVHLTRAGSTLVLFQKGAQFPLAYFQTPLTDNQASPWGLLLLLGCQYLQTQALSSYAKPILKYYHNLPKTSLDNWIQSSEDPRVQELLQLWPQISSQGIQPPGPWKTLITRAEVFLTPQFSPDPIPAALCLFSDGATGRGAYCLWKDHLLDFQAVPAPESAQKGELAGLLAGLAAAPPEPVNIWVDSKYLYSLLRTWVLGAWLQPDPVPSYALLYKSLLRHPAIVVGHVRSHSSASHPIASLNNYVDQL

SEQ ID NO: 8011 - protein, 576 aa, synthetic construct
GVLDTPPSHIGLEHLPPPPEVPQFPLNLERLQALQDLVHRSLEAGYISPWDGPGNNPVFPVRKPNGAWRFVHDLRATNALTKPIPALSPGPPDLTAPPTHPPHIICLDLKDAFFQIPVEDRFRFYLSFTLPSPGGLQPHRRFAWRVLPQGFINSPALFQRALQEPLRQVSAAFSQSLLVSYMDDILYASPTEEQRSQCYQALAARLRDLGFQVASEKTSQTPSPVPFLGQMVHEQIVTYQSLPTLQISSPISLHQLQAVLGDLQWVSRGTPTTRRPLQLLYSSLKRHHDPRAIIQLSPEQLQGIAELRQALSHNARSRYNEQEPLLAYVHLTRAGSTLVLFQKGAQFPLAYFQTPLTDNQASPWGLLLLLGCQYLQTQALSSYAKPILKYYHNLPKTSLDNWIQSSEDPRVQELLQLWPQISSQGIQPPGPWKTLITRAEVFLTPQFSPDPIPAALCLFSDGATGRGAYCLWKDHLLDFQAVPAPESAQKGELAGLLAGLAAAPPEPVNIWVDSKYLYSLLRTWVLGAWLQPDPVPSYALLYKSLLRHPAIVVGHVRSHSSASHPIASLNNYVDQL

SEQ ID NO: 8012 - protein, 748 aa, Feline foamy virus
MDLLKPLTVERKGVKIKGYWNSQADITCVPKDLLQGEEPVRQQNVTTIHGTQEGDVYYVNLKIDGRRINTEVIGTTLDYAIITPGDVPWILKKPLELTIKLDLEEQQGTLLNNSILSKKGKEELKQLFEKYSALWQSWENQVGHRRIRPHKIATGTVKPTPQKQYHINPKAKPDIQIVINDLLKQGVLIQKESTMNTPVYPVPKPNGRWRMVLDYRAVNKVTPLIAVQNQHSYGILGSLFKGRYKTTIDLSNGFWAHPIVPEDYWITAFTWQGKQYCWTVLPQGFLNSPGLFTGDVVDLLQGIPNVEVYVDDVYISHDSEKEHLEYLDILFNRLKEAGYIISLKKSNIANSIVDFLGFQITNEGRGLTDTFKEKLENITAPTTLKQLQSILGLLNFARNFIPDFTELIAPLYALIPKSTKNYVPWQIEHSTTLETLITKLNGAEYLQGRKGDKTLIMKVNASYTTGYIRYYNEGEKKPISYVSIVFSKTELKFTELEKLLTTVHKGLLKALDLSMGQNIHVYSPIVSMQNIQKTPQTAKKALASRWLSWLSYLEDPRIRFFYDPQMPALKDLPAVDTGKDNKKHPSNFQHIFYTDGSAITSPTKEGHLNAGMGIVYFINKDGNLQKQQEWSISLGNHTAQFAEIAAFEFALKKCLPLGGNILVVTDSNYVAKAYNEELDVWASNGFVNNRKKPLKHISKWKSVADLKRLRPDVVVTHEPGHQKLDSSPHAYGNNLADQLATQASFKVH

SEQ ID NO: 8013 - protein, 748 aa, synthetic construct
MDLLKPLTVERKGVKIKGYWNSQADITCVPKDLLQGEEPVRQQNVTTIHGTQEGDVYYVNLKIDGRRINTEVIGTTLDYAIITPGDVPWILKKPLELTIKLDLEEQQGTLLNNSILSKKGKEELKQLFEKYSALWQSWENQVGHRRIRPHKIATGTVKPTPQKQYHINPKAKPDIQIVINDLLKQGVLIQKESTMNTPVYPVPKPNGRWRMVLDYRAVNKVTPLIAVQNQHSYGILGSLFKGRYKTTIDLSNGFWAHPIVPEDYWITAFTWQGKQYCWTVLPQGFLNSPGLFNGDVVDLLQGIPNVEVYVDDVYISHDSEKEHLEYLDILFNRLKEAGYIISLKKSNIANSIVDFLGFQITNEGRGLTDTFKEKLENITAPTTLKQLQSILGLLNFARNFIPDFTELIAPLYALIPKSPKNYVPWQIEHSTTLETLITKLNGAEYLQGRKGDKTLIMKVNASYTTGYIRYYNEGEKKPISYVSIVFSKTELKFTELEKLLTTVHKGLLKALDLSMGQNIHVYSPIVSMQNIQKTPQTAKKALASRWLSWLSYLEDPRIRFFYDPQMPALKDLPAVDTGKDNKKHPSNFQHIFYTDGSAITSPTKEGHLNAGMGIVYFINKDGNLQKQQEWSISLGNHTAQFAEIAAFEFALKKCLPLGGNILVVTDSNYVAKAYNEELDVWASNGFVNNRKKPLKHISKWKSVADLKRLRPDVVVTHEPGHQKLDSSPHAYGNNLADQLATQASFKVH

SEQ ID NO: 8014 - protein, 748 aa, synthetic construct
MDLLKPLTVERKGVKIKGYWNSQADITCVPKDLLQGEEPVRQQNVTTIHGTQEGDVYYVNLKIDGRRINTEVIGTTLDYAIITPGDVPWILKKPLELTIKLDLEEQQGTLLNNSILSKKGKEELKQLFEKYSALWQSWENQVGHRRIRPHKIATGTVKPTPQKQYHINPKAKPDIQIVINDLLKQGVLIQKESTMNTPVYPVPKPNGRWRMVLDYRAVNKVTPLIAVQNQHSYGILGSLFKGRYKTTIDLSNGFWAHPIVPEDYWITAFTWQGKQYCWTVLPQGFLNSPGLFNGDVVDLLQGIPNVEVYVDDVYISHDSEKEHLEYLDILFNRLKEAGYIISLKKSNIANSIVDFLGFQITNEGRGLTDTFKEKLENITAPTTLKQLQSILGKLNFARNFIPDFTELIAPLYALIPKSPKNYVPWQIEHSTTLETLITKLNGAEYLQGRKGDKTLIMKVNASYTTGYIRYYNEGEKKPISYVSIVFSKTELKFTELEKLLTTVHKGLLKALDLSMGQNIHVYSPIVSMQNIQKTPQTAKKALASRWLSWLSYLEDPRIRFFYDPQMPALKDLPAVDTGKDNKKHPSNFQHIFYTDGSAITSPTKEGHLNAGMGIVYFINKDGNLQKQQEWSISLGNHTAQFAEIAAFEFALKKCLPLGGNILVVTDSNYVAKAYNEELDVWASNGFVNNRKKPLKHISKWKSVADLKRLRPDVVVTHEPGHQKLDSSPHAYGNNLADQLATQASFKVH

SEQ ID NO: 8015 - protein, 662 aa, Feline foamy virus
VPWILKKPLELTIKLDLEEQQGTLLNNSILSKKGKEELKQLFEKYSALWQSWENQVGHRRIRPHKIATGTVKPTPQKQYHINPKAKPDIQIVINDLLKQGVLIQKESTMNTPVYPVPKPNGRWRMVLDYRAVNKVTPLIAVQNQHSYGILGSLFKGRYKTTIDLSNGFWAHPIVPEDYWITAFTWQGKQYCWTVLPQGFLNSPGLFTGDVVDLLQGIPNVEVYVDDVYISHDSEKEHLEYLDILFNRLKEAGYIISLKKSNIANSIVDFLGFQITNEGRGLTDTFKEKLENITAPTTLKQLQSILGLLNFARNFIPDFTELIAPLYALIPKSTKNYVPWQIEHSTTLETLITKLNGAEYLQGRKGDKTLIMKVNASYTTGYIRYYNEGEKKPISYVSIVFSKTELKFTELEKLLTTVHKGLLKALDLSMGQNIHVYSPIVSMQNIQKTPQTAKKALASRWLSWLSYLEDPRIRFFYDPQMPALKDLPAVDTGKDNKKHPSNFQHIFYTDGSAITSPTKEGHLNAGMGIVYFINKDGNLQKQQEWSISLGNHTAQFAEIAAFEFALKKCLPLGGNILVVTDSNYVAKAYNEELDVWASNGFVNNRKKPLKHISKWKSVADLKRLRPDVVVTHEPGHQKLDSSPHAYGNNLADQLATQASFKVH

SEQ ID NO: 8016 - protein, 662 aa, synthetic construct
VPWILKKPLELTIKLDLEEQQGTLLNNSILSKKGKEELKQLFEKYSALWQSWENQVGHRRIRPHKIATGTVKPTPQKQYHINPKAKPDIQIVINDLLKQGVLIQKESTMNTPVYPVPKPNGRWRMVLDYRAVNKVTPLIAVQNQHSYGILGSLFKGRYKTTIDLSNGFWAHPIVPEDYWITAFTWQGKQYCWTVLPQGFLNSPGLFNGDVVDLLQGIPNVEVYVDDVYISHDSEKEHLEYLDILFNRLKEAGYIISLKKSNIANSIVDFLGFQITNEGRGLTDTFKEKLENITAPTTLKQLQSILGLLNFARNFIPDFTELIAPLYALIPKSPKNYVPWQIEHSTTLETLITKLNGAEYLQGRKGDKTLIMKVNASYTTGYIRYYNEGEKKPISYVSIVFSKTELKFTELEKLLTTVHKGLLKALDLSMGQNIHVYSPIVSMQNIQKTPQTAKKALASRWLSWLSYLEDPRIRFFYDPQMPALKDLPAVDTGKDNKKHPSNFQHIFYTDGSAITSPTKEGHLNAGMGIVYFINKDGNLQKQQEWSISLGNHTAQFAEIAAFEFALKKCLPLGGNILVVTDSNYVAKAYNEELDVWASNGFVNNRKKPLKHISKWKSVADLKRLRPDVVVTHEPGHQKLDSSPHAYGNNLADQLATQASFKVH

SEQ ID NO: 8017 - protein, 662 aa, synthetic construct
VPWILKKPLELTIKLDLEEQQGTLLNNSILSKKGKEELKQLFEKYSALWQSWENQVGHRRIRPHKIATGTVKPTPQKQYHINPKAKPDIQIVINDLLKQGVLIQKESTMNTPVYPVPKPNGRWRMVLDYRAVNKVTPLIAVQNQHSYGILGSLFKGRYKTTIDLSNGFWAHPIVPEDYWITAFTWQGKQYCWTVLPQGFLNSPGLFNGDVVDLLQGIPNVEVYVDDVYISHDSEKEHLEYLDILFNRLKEAGYIISLKKSNIANSIVDFLGFQITNEGRGLTDTFKEKLENITAPTTLKQLQSILGKLNFARNFIPDFTELIAPLYALIPKSPKNYVPWQIEHSTTLETLITKLNGAEYLQGRKGDKTLIMKVNASYTTGYIRYYNEGEKKPISYVSIVFSKTELKFTELEKLLTTVHKGLLKALDLSMGQNIHVYSPIVSMQNIQKTPQTAKKALASRWLSWLSYLEDPRIRFFYDPQMPALKDLPAVDTGKDNKKHPSNFQHIFYTDGSAITSPTKEGHLNAGMGIVYFINKDGNLQKQQEWSISLGNHTAQFAEIAAFEFALKKCLPLGGNILVVTDSNYVAKAYNEELDVWASNGFVNNRKKPLKHISKWKSVADLKRLRPDVVVTHEPGHQKLDSSPHAYGNNLADQLATQASFKVH

SEQ ID NO: 8018 - protein, 670 aa, Feline leukemia virus
TLQLEEEYRLFEPESTQKQEMDIWLKNFPQAWAETGGMGTAHCQAPVLIQLKATATPISIRQYPMPHEAYQGIKPHIRRMLDQGILKPCQSPWNTPLLPVKKPGTEDYRPVQDLREVNKRVEDIHPTVPNPYNLLSTLPPSHPWYTVLDLKDAFFCLRLHSESQLLFAFEWRDPEIGLSGQLTWTRLPQGFKNSPTLFDEALHSDLADFRVRYPALVLLQYVDDLLLAAATRTECLEGTKALLETLGNKGYRASAKKAQICLQEVTYLGYSLKDGQRWLTKARKEAILSIPVPKNSRQVREFLGTAGYCRLWIPGFAELAAPLYPLTRPGTLFQWGTEQQLAFEDIKKALLSSPALGLPDITKPFELFIDENSGFAKGVLVQKLGPWKRPVAYLSKKLDTVASGWPPCLRMVAAIAILVKDAGKLTLGQPLTILTSHPVEALVRQPPNKWLSNARMTHYQAMLLDAERVHFGPTVSLNPATLLPLPSGGNHHDCLQILAETHGTRPDLTDQPLPDADLTWYTDGSSFIRNGEREAGAAVTTESEVIWAAPLPPGTSAQRAELIALTQALKMAEGKKLTVYTDSRYAFATTHVHGEIYRRRGLLTSEGKEIKNKNEILALLEALFLPKRLSIIHCPGHQKGDSPQAKGNRLADDTAKKAATETHSSLTVLP

SEQ ID NO: 8019 - protein, 670 aa, synthetic construct
TLQLEEEYRLFEPESTQKQEMDIWLKNFPQAWAETGGMGTAHCQAPVLIQLKATATPISIRQYPMPHEAYQGIKPHIRRMLDQGILKPCQSPWNTPLLPVKKPGTEDYRPVQDLREVNKRVEDIHPTVPNPYNLLSTLPPSHPWYTVLDLKDAFFCLRLHSESQLLFAFEWRDPEIGLSGQLTWTRLPQGFKNSPTLFNEALHSDLADFRVRYPALVLLQYVDDLLLAAATRTECLEGTKALLETLGNKGYRASAKKAQICLQEVTYLGYSLKDGQRWLTKARKEAILSIPVPKNSRQVREFLGTAGYCRLWIPGFAELAAPLYPLTRPGTLFQWGTEQQLAFEDIKKALLSSPALGLPDITKPFELFIDENSGFAKGVLVQKLGPWKRPVAYLSKKLDTVASGWPPCLRMVAAIAILVKDAGKLTLGQPLTILTSHPVEALVRQPPNKWLSNARMTHYQAMLLDAERVHFGPTVSLNPATLLPLPSGGNHHDCLQILAETHGTRPDLTDQPLPDADLTWYTDGSSFIRNGEREAGAAVTTESEVIWAAPLPPGTSAQRAELIALTQALKMAEGKKLTVYTDSRYAFATTHVHGEIYRRRGWLTSEGKEIKNKNEILALLEALFLPKRLSIIHCPGHQKGDSPQAKGNRLADDTAKKAATETHSSLTVLP

SEQ ID NO: 8020 - protein, 670 aa, synthetic construct
TLQLEEEYRLFEPESTQKQEMDIWLKNFPQAWAETGGMGTAHCQAPVLIQLKATATPISIRQYPMPHEAYQGIKPHIRRMLDQGILKPCQSPWNTPLLPVKKPGTEDYRPVQDLREVNKRVEDIHPTVPNPYNLLSTLPPSHPWYTVLDLKDAFFCLRLHSESQLLFAFEWRDPEIGLSGQLTWTRLPQGFKNSPTLFNEALHSDLADFRVRYPALVLLQYVDDLLLAAATRTECLEGTKALLETLGNKGYRASAKKAQICLQEVTYLGYSLKDGQRWLTKARKEAILSIPVPKNSRQVREFLGKAGYCRLFIPGFAELAAPLYPLTRPGTLFQWGTEQQLAFEDIKKALLSSPALGLPDITKPFELFIDENSGFAKGVLVQKLGPWKRPVAYLSKKLDTVASGWPPCLRMVAAIAILVKDAGKLTLGQPLTILTSHPVEALVRQPPNKWLSNARMTHYQAMLLDAERVHFGPTVSLNPATLLPLPSGGNHHDCLQILAETHGTRPDLTDQPLPDADLTWYTDGSSFIRNGEREAGAAVTTESEVIWAAPLPPGTSAQRAELIALTQALKMAEGKKLTVYTDSRYAFATTHVHGEIYRRRGWLTSEGKEIKNKNEILALLEALFLPKRLSIIHCPGHQKGDSPQAKGNRLADDTAKKAATETHSSLTVLP

SEQ ID NO: 8021 - protein, 751 aa, unidentified
MNPLQLLQPLPAEIKGTKLLAHWNSGATITCIPESFLEDEQPIKKTLIKTIHGEKQQNVYYVTFKVKGRKVEAEVIASPYEYILLSPTDVPWLTQQPLQLTILVPLQEYQEKILSKTALPEDQKQQLKTLFVKYDNLWQHWENQVGHRKIRPHNIATGDYPPRPQKQYPINPKAKPSIQIVIDDLLKQGVLTPQNSTMNTPVYPVPKPDGRWRMVLDYREVNKTIPLTAAQNQHSAGILATIVRQKYKTTLDLANGFWAHPITPESYWLTAFTWQGKQYCWTRLPQGFLNSPALFTADVVDLLKEIPNVQVYVDDIYLSHDDPKEHVQQLEKVFQILLQAGYVVSLKKSEIGQKTVEFLGFNITKEGRGLTDTFKTKLLNITPPKDLKQLQSILGLLNFARNFIPNFAELVQPLYNLIASAKGKYIEWSEENTKQLNMVIEALNTASNLEERLPEQRLVIKVNTSPSAGYVRYYNETGKKPIMYLNYVFSKAELKFSMLEKLLTTMHKALIKAMDLAMGQEILVYSPIVSMTKIQKTPLPERKALPIRWITWMTYLEDPRIQFHYDKTLPELKHIPDVYTSSQSPVKHPSQYEGVFYTDGSAIKSPDPTKSNNAGMGIVHATYKPEYQVLNQWSIPLGNHTAQMAEIAAVEFACKKALKIPGPVLVITDSFYVAESANKELPYWKSNGFVNNKKKPLKHISKWKSIAECLSMKPDITIQHEKGISLQIPVFILKGNALADKLATQGSYVVN

SEQ ID NO: 8022 - protein, 751 aa, synthetic construct
MNPLQLLQPLPAEIKGTKLLAHWNSGATITCIPESFLEDEQPIKKTLIKTIHGEKQQNVYYVTFKVKGRKVEAEVIASPYEYILLSPTDVPWLTQQPLQLTILVPLQEYQEKILSKTALPEDQKQQLKTLFVKYDNLWQHWENQVGHRKIRPHNIATGDYPPRPQKQYPINPKAKPSIQIVIDDLLKQGVLTPQNSTMNTPVYPVPKPDGRWRMVLDYREVNKTIPLTAAQNQHSAGILATIVRQKYKTTLDLANGFWAHPITPESYWLTAFTWQGKQYCWTRLPQGFLNSPALFNADVVDLLKEIPNVQVYVDDIYLSHDDPKEHVQQLEKVFQILLQAGYVVSLKKSEIGQKTVEFLGFNITKEGRGLTDTFKTKLLNITPPKDLKQLQSILGLLNFARNFIPNFAELVQPLYNLIAPAKGKYIEWSEENTKQLNMVIEALNTASNLEERLPEQRLVIKVNTSPSAGYVRYYNETGKKPIMYLNYVFSKAELKFSMLEKLLTTMHKALIKAMDLAMGQEILVYSPIVSMTKIQKTPLPERKALPIRWITWMTYLEDPRIQFHYDKTLPELKHIPDVYTSSQSPVKHPSQYEGVFYTDGSAIKSPDPTKSNNAGMGIVHATYKPEYQVLNQWSIPLGNHTAQMAEIAAVEFACKKALKIPGPVLVITDSFYVAESANKELPYWKSNGFVNNKKKPLKHISKWKSIAECLSMKPDITIQHEKGISLQIPVFILKGNALADKLATQGSYVVN

SEQ ID NO: 8023 - protein, 751 aa, synthetic construct
MNPLQLLQPLPAEIKGTKLLAHWNSGATITCIPESFLEDEQPIKKTLIKTIHGEKQQNVYYVTFKVKGRKVEAEVIASPYEYILLSPTDVPWLTQQPLQLTILVPLQEYQEKILSKTALPEDQKQQLKTLFVKYDNLWQHWENQVGHRKIRPHNIATGDYPPRPQKQYPINPKAKPSIQIVIDDLLKQGVLTPQNSTMNTPVYPVPKPDGRWRMVLDYREVNKTIPLTAAQNQHSAGILATIVRQKYKTTLDLANGFWAHPITPESYWLTAFTWQGKQYCWTRLPQGFLNSPALFNADVVDLLKEIPNVQVYVDDIYLSHDDPKEHVQQLEKVFQILLQAGYVVSLKKSEIGQKTVEFLGFNITKEGRGLTDTFKTKLLNITPPKDLKQLQSILGKLNFARNFIPNFAELVQPLYNLIAPAKGKYIEWSEENTKQLNMVIEALNTASNLEERLPEQRLVIKVNTSPSAGYVRYYNETGKKPIMYLNYVFSKAELKFSMLEKLLTTMHKALIKAMDLAMGQEILVYSPIVSMTKIQKTPLPERKALPIRWITWMTYLEDPRIQFHYDKTLPELKHIPDVYTSSQSPVKHPSQYEGVFYTDGSAIKSPDPTKSNNAGMGIVHATYKPEYQVLNQWSIPLGNHTAQMAEIAAVEFACKKALKIPGPVLVITDSFYVAESANKELPYWKSNGFVNNKKKPLKHISKWKSIAECLSMKPDITIQHEKGISLQIPVFILKGNALADKLATQGSYVVN

SEQ ID NO: 8024 - protein, 662 aa, unidentified
VPWLTQQPLQLTILVPLQEYQEKILSKTALPEDQKQQLKTLFVKYDNLWQHWENQVGHRKIRPHNIATGDYPPRPQKQYPINPKAKPSIQIVIDDLLKQGVLTPQNSTMNTPVYPVPKPDGRWRMVLDYREVNKTIPLTAAQNQHSAGILATIVRQKYKTTLDLANGFWAHPITPESYWLTAFTWQGKQYCWTRLPQGFLNSPALFTADVVDLLKEIPNVQVYVDDIYLSHDDPKEHVQQLEKVFQILLQAGYVVSLKKSEIGQKTVEFLGFNITKEGRGLTDTFKTKLLNITPPKDLKQLQSILGLLNFARNFIPNFAELVQPLYNLIASAKGKYIEWSEENTKQLNMVIEALNTASNLEERLPEQRLVIKVNTSPSAGYVRYYNETGKKPIMYLNYVFSKAELKFSMLEKLLTTMHKALIKAMDLAMGQEILVYSPIVSMTKIQKTPLPERKALPIRWITWMTYLEDPRIQFHYDKTLPELKHIPDVYTSSQSPVKHPSQYEGVFYTDGSAIKSPDPTKSNNAGMGIVHATYKPEYQVLNQWSIPLGNHTAQMAEIAAVEFACKKALKIPGPVLVITDSFYVAESANKELPYWKSNGFVNNKKKPLKHISKWKSIAECLSMKPDITIQHEKGISLQIPVFILKGNALADKLATQGSYVVN

SEQ ID NO: 8025 - protein, 662 aa, synthetic construct
VPWLTQQPLQLTILVPLQEYQEKILSKTALPEDQKQQLKTLFVKYDNLWQHWENQVGHRKIRPHNIATGDYPPRPQKQYPINPKAKPSIQIVIDDLLKQGVLTPQNSTMNTPVYPVPKPDGRWRMVLDYREVNKTIPLTAAQNQHSAGILATIVRQKYKTTLDLANGFWAHPITPESYWLTAFTWQGKQYCWTRLPQGFLNSPALFNADVVDLLKEIPNVQVYVDDIYLSHDDPKEHVQQLEKVFQILLQAGYVVSLKKSEIGQKTVEFLGFNITKEGRGLTDTFKTKLLNITPPKDLKQLQSILGLLNFARNFIPNFAELVQPLYNLIAPAKGKYIEWSEENTKQLNMVIEALNTASNLEERLPEQRLVIKVNTSPSAGYVRYYNETGKKPIMYLNYVFSKAELKFSMLEKLLTTMHKALIKAMDLAMGQEILVYSPIVSMTKIQKTPLPERKALPIRWITWMTYLEDPRIQFHYDKTLPELKHIPDVYTSSQSPVKHPSQYEGVFYTDGSAIKSPDPTKSNNAGMGIVHATYKPEYQVLNQWSIPLGNHTAQMAEIAAVEFACKKALKIPGPVLVITDSFYVAESANKELPYWKSNGFVNNKKKPLKHISKWKSIAECLSMKPDITIQHEKGISLQIPVFILKGNALADKLATQGSYVVN

SEQ ID NO: 8026 - protein, 662 aa, synthetic construct
VPWLTQQPLQLTILVPLQEYQEKILSKTALPEDQKQQLKTLFVKYDNLWQHWENQVGHRKIRPHNIATGDYPPRPQKQYPINPKAKPSIQIVIDDLLKQGVLTPQNSTMNTPVYPVPKPDGRWRMVLDYREVNKTIPLTAAQNQHSAGILATIVRQKYKTTLDLANGFWAHPITPESYWLTAFTWQGKQYCWTRLPQGFLNSPALFNADVVDLLKEIPNVQVYVDDIYLSHDDPKEHVQQLEKVFQILLQAGYVVSLKKSEIGQKTVEFLGFNITKEGRGLTDTFKTKLLNITPPKDLKQLQSILGKLNFARNFIPNFAELVQPLYNLIAPAKGKYIEWSEENTKQLNMVIEALNTASNLEERLPEQRLVIKVNTSPSAGYVRYYNETGKKPIMYLNYVFSKAELKFSMLEKLLTTMHKALIKAMDLAMGQEILVYSPIVSMTKIQKTPLPERKALPIRWITWMTYLEDPRIQFHYDKTLPELKHIPDVYTSSQSPVKHPSQYEGVFYTDGSAIKSPDPTKSNNAGMGIVHATYKPEYQVLNQWSIPLGNHTAQMAEIAAVEFACKKALKIPGPVLVITDSFYVAESANKELPYWKSNGFVNNKKKPLKHISKWKSIAECLSMKPDITIQHEKGISLQIPVFILKGNALADKLATQGSYVVN

SEQ ID NO: 8027 - protein, 669 aa, Gibbon ape leukemia virus
VLNLEEEYRLHEKPVPSSIDPSWLQLFPTVWAERAGMGLANQVPPVVVELRSGASPVAVRQYPMSKEAREGIRPHIQKFLDLGVLVPCRSPWNTPLLPVKKPGTNDYRPVQDLREINKRVQDIHPTVPNPYNLLSSLPPSYTWYSVLDLKDAFFCLRLHPNSQPLFAFEWKDPEKGNTGQLTWTRLPQGFKNSPTLFDEALHRDLAPFRALNPQVVLLQYVDDLLVAAPTYEDCKKGTQKLLQELSKLGYRVSAKKAQLCQREVTYLGYLLKEGKRWLTPARKATVMKIPVPTTPRQVREFLGTAGFCRLWIPGFASLAAPLYPLTKESIPFIWTEEHQQAFDHIKKALLSAPALALPDLTKPFTLYIDERAGVARGVLTQTLGPWRRPVAYLSKKLDPVASGWPTCLKAVAAVALLLKDADKLTLGQNVTVIASHSLESIVRQPPDRWMTNARMTHYQSLLLNERVSFAPPAVLNPATLLPVESEATPVHRCSEILAEETGTRRDLEDQPLPGVPTWYTDGSSFITEGKRRAGAPIVDGKRTVWASSLPEGTSAQKAELVALTQALRLAEGKNINIYTDSRYAFATAHIHGAIYKQRGLLTSAGKDIKNKEEILALLEAIHLPRRVAIIHCPGHQRGSNPVATGNRRADEAAKQAALSTRVLAGTTKP

SEQ ID NO: 8028 - protein, 669 aa, synthetic construct
VLNLEEEYRLHEKPVPSSIDPSWLQLFPTVWAERAGMGLANQVPPVVVELRSGASPVAVRQYPMSKEAREGIRPHIQKFLDLGVLVPCRSPWNTPLLPVKKPGTNDYRPVQDLREINKRVQDIHPTVPNPYNLLSSLPPSYTWYSVLDLKDAFFCLRLHPNSQPLFAFEWKDPEKGNTGQLTWTRLPQGFKNSPTLFNEALHRDLAPFRALNPQVVLLQYVDDLLVAAPTYEDCKKGTQKLLQELSKLGYRVSAKKAQLCQREVTYLGYLLKEGKRWLTPARKATVMKIPVPTTPRQVREFLGTAGFCRLWIPGFASLAAPLYPLTKPSIPFIWTEEHQQAFDHIKKALLSAPALALPDLTKPFTLYIDERAGVARGVLTQTLGPWRRPVAYLSKKLDPVASGWPTCLKAVAAVALLLKDADKLTLGQNVTVIASHSLESIVRQPPDRWMTNARMTHYQSLLLNERVSFAPPAVLNPATLLPVESEATPVHRCSEILAEETGTRRDLEDQPLPGVPTWYTDGSSFITEGKRRAGAPIVDGKRTVWASSLPEGTSAQKAELVALTQALRLAEGKNINIYTDSRYAFATAHIHGAIYKQRGWLTSAGKDIKNKEEILALLEAIHLPRRVAIIHCPGHQRGSNPVATGNRRADEAAKQAALSTRVLAGTTKP

SEQ ID NO: 8029 - protein, 669 aa, synthetic construct
VLNLEEEYRLHEKPVPSSIDPSWLQLFPTVWAERAGMGLANQVPPVVVELRSGASPVAVRQYPMSKEAREGIRPHIQKFLDLGVLVPCRSPWNTPLLPVKKPGTNDYRPVQDLREINKRVQDIHPTVPNPYNLLSSLPPSYTWYSVLDLKDAFFCLRLHPNSQPLFAFEWKDPEKGNTGQLTWTRLPQGFKNSPTLFNEALHRDLAPFRALNPQVVLLQYVDDLLVAAPTYEDCKKGTQKLLQELSKLGYRVSAKKAQLCQREVTYLGYLLKEGKRWLTPARKATVMKIPVPTTPRQVREFLGKAGFCRLFIPGFASLAAPLYPLTKPSIPFIWTEEHQQAFDHIKKALLSAPALALPDLTKPFTLYIDERAGVARGVLTQTLGPWRRPVAYLSKKLDPVASGWPTCLKAVAAVALLLKDADKLTLGQNVTVIASHSLESIVRQPPDRWMTNARMTHYQSLLLNERVSFAPPAVLNPATLLPVESEATPVHRCSEILAEETGTRRDLEDQPLPGVPTWYTDGSSFITEGKRRAGAPIVDGKRTVWASSLPEGTSAQKAELVALTQALRLAEGKNINIYTDSRYAFATAHIHGAIYKQRGWLTSAGKDIKNKEEILALLEAIHLPRRVAIIHCPGHQRGSNPVATGNRRADEAAKQAALSTRVLAGTTKP

SEQ ID NO: 8030 - protein, 588 aa, unidentified
AVLGLEHLPRPPQISQFPLNPERLQALQHLVRKALEAGHIEPYTGPGNNPVFPVKKANGTWRFIHDLRATNSLTIDLSSSSPGPPDLSSLPTTLAHLQTIDLRDAFFQIPLPKQFQPYFAFTVPQQCNYGPGTRYAWKVLPQGFKNSPTLFEMQLAHILQPIRQAFPQCTILQYMDDILLASPSHEDLLLLSEATMASLISHGLPVSENKTQQTPGTIKFLGQIISPNHLTYDAVPTVPIRSRWALPELQALLGEIQWVSKGTPTLRQPLHSLYCALQRHTDPRDQIYLNPSQVQSLVQLRQALSQNCRSRLVQTLPLLGAIMLTLTGTTTVVFQSKEQWPLVWLHAPLPHTSQCPWGQLLASAVLLLDKYTLQSYGLLCQTIHHNISTQTFNQFIQTSDHPSVPILLHHSHRFKNLGAQTGELWNTFLKTAAPLAPVKALMPVFTLSPVIINTAPCLFSDGSTSRAAYILWDKQILSQRSFPLPPPHKSAQRAELLGLLHGLSSARSWRCLNIFLDSKYLYHYLRTLALGTFQGRSSQAPFQALLPRLLSRKVVYLHHVRSHTNLPDPISRLNALTDALLITPVLQL

SEQ ID NO: 8031 - protein, 588 aa, synthetic construct
AVLGLEHLPRPPQISQFPLNPERLQALQHLVRKALEAGHIEPYTGPGNNPVFPVKKANGTWRFIHDLRATNSLTIDLSSSSPGPPDLSSLPTTLAHLQTIDLRDAFFQIPLPKQFQPYFAFTVPQQCNYGPGTRYAWKVLPQGFKNSPTLFQMQLAHILQPIRQAFPQCTILQYMDDILLASPSHEDLLLLSEATMASLISHGLPVSENKTQQTPGTIKFLGQIISPNHLTYDAVPTVPIRSRWALPELQALLGEIQWVSKGTPTLRQPLHSLYCALQPHTDPRDQIYLNPSQVQSLVQLRQALSQNCRSRLVQTLPLLGAIMLTLTGTTTVVFQSKEQWPLVWLHAPLPHTSQCPWGQLLASAVLLLDKYTLQSYGLLCQTIHHNISTQTFNQFIQTSDHPSVPILLHHSHRFKNLGAQTGELWNTFLKTAAPLAPVKALMPVFTLSPVIINTAPCLFSDGSTSRAAYILWDKQILSQRSFPLPPPHKSAQRAELLGLLHGLSSARSWRCLNIFLDSKYLYHYLRTLALGTFQGRSSQAPFQALLPRLLSRKVVYLHHVRSHTNLPDPISRLNALTDALLITPVLQL

SEQ ID NO: 8032 - protein, 588 aa, synthetic construct
AVLGLEHLPRPPQISQFPLNPERLQALQHLVRKALEAGHIEPYTGPGNNPVFPVKKANGTWRFIHDLRATNSLTIDLSSSSPGPPDLSSPPTTLAHLQTIDLRDAFFQIPLPKQFQPYFAFTVPQQCNYGPGTRYAWKVLPQGFKNSPTLFQMQLAHILQPIRQAFPQCTILQYMDDILLASPSHEDLLLLSEATMASLISHGLPVSENKTQQTPGTIKFLGQIISPNHLTYDAVPTVPIRSRWALPELQALLGEIQWVSKGTPTLRQPLHSLYCALQPHTDPRDQIYLNPSQVQSLVQLRQALSQNCRSRLVQTLPLLGAIMLTLTGTTTVVFQSKEQWPLVWLHAPLPHTSQCPWGQLLASAVLLLDKYTLQSYGLLCQTIHHNISTQTFNQFIQTSDHPSVPILLHHSHRFKNLGAQTGELWNTFLKTAAPLAPVKALMPVFTLSPVIINTAPCLFSDGSTSRAAYILWDKQILSQRSFPLPPPHKSAQRAELLGLLHGLSSARSWRCLNIFLDSKYLYHYLRTLALGTFQGRSSQAPFQALLPRLLSRKVVYLHHVRSHTNLPDPISRLNALTDALLITPVLQL

SEQ ID NO: 8033 - protein, 588 aa, unidentified
AVLGLEHLPRPPEISQFPLNPERLQALQHLVRKALEAGHIEPYTGPGNNPVFPVKKANGTWRFIHDLRATNSLTIDLSSSSPGPPDLSSLPTTLAHLQTIDLKDAFFQIPLPKQFQPYFAFTVPQQCNYGPGTRYAWRVLPQGFKNSPTLFEMQLAHILQPIRQAFPQCTILQYMDDILLASPSHADLQLLSEATMASLISHGLPVSENKTQQTPGTIKFLGQIISPNHLTYDAVPKVPIRSRWALPELQALLGEIQWVSKGTPTLRQPLHSLYCALQRHTDPRDQIYLNPSQVQSLVQLRQALSQNCRSRLVQTLPLLGAIMLTLTGTTTVVFQSKQQWPLVWLHAPLPHTSQCPWGQLLASAVLLLDKYTLQSYGLLCQTIHHNISTQTFNQFIQTSDHPSVPILLHHSHRFKNLGAQTGELWNTFLKTTAPLAPVKALMPVFTLSPVIINTAPCLFSDGSTSQAAYILWDKHILSQRSFPLPPPHKSAQRAELLGLLHGLSSARSWRCLNIFLDSKYLYHYLRTLALGTFQGRSSQAPFQALLPRLLSRKVVYLHHVRSHTNLPDPISRLNALTDALLITPVLQL

SEQ ID NO: 8034 - protein, 588 aa, synthetic construct
AVLGLEHLPRPPEISQFPLNPERLQALQHLVRKALEAGHIEPYTGPGNNPVFPVKKANGTWRFIHDLRATNSLTIDLSSSSPGPPDLSSLPTTLAHLQTIDLKDAFFQIPLPKQFQPYFAFTVPQQCNYGPGTRYAWRVLPQGFKNSPTLFQMQLAHILQPIRQAFPQCTILQYMDDILLASPSHADLQLLSEATMASLISHGLPVSENKTQQTPGTIKFLGQIISPNHLTYDAVPKVPIRSRWALPELQALLGEIQWVSKGTPTLRQPLHSLYCALQPHTDPRDQIYLNPSQVQSLVQLRQALSQNCRSRLVQTLPLLGAIMLTLTGTTTVVFQSKQQWPLVWLHAPLPHTSQCPWGQLLASAVLLLDKYTLQSYGLLCQTIHHNISTQTFNQFIQTSDHPSVPILLHHSHRFKNLGAQTGELWNTFLKTTAPLAPVKALMPVFTLSPVIINTAPCLFSDGSTSQAAYILWDKHILSQRSFPLPPPHKSAQRAELLGLLHGLSSARSWRCLNIFLDSKYLYHYLRTLALGTFQGRSSQAPFQALLPRLLSRKVVYLHHVRSHTNLPDPISRLNALTDALLITPVLQL

SEQ ID NO: 8035 - protein, 583 aa, unidentified
GLEHLPRPPEISQFPLNPERLQALQHLVRKALEAGHIEPYTGPGNNPVFPVKKANGTWRFIHDLRATNSLTVDLSSSSPGPPDLSSLPTTLAHLQTIDLKDAFFQIPLPKQFQPYFAFTVPQQCNYGPGTRYAWKVLPQGFKNSPTLFEMQLASILQPIRQAFPQCVILQYMDDILLASPSPEDLQQLSEATMASLISHGLPVSQDKTQQTPGTIKFLGQIISPNHITYDAVPTVPIRSRWALPELQALLGEIQWVSKGTPTLRQPLHSLYCALQGHTDPRDQIYLNPSQVQSLMQLQQALSQNCRSRLAQTLPLLGAIMLTLTGTTTVVFQSKQQWPLVWLHAPLPHTSQCPWGQLLASAVLLLDKYTLQSYGLLCQTIHHNISIQTFNQFIQTSDHPSVPILLHHSHRFKNLGAQTGELWNTFLKTAAPLAPVKALTPVFTLSPIIINTAPCLFSDGSTSQAAYILWDKHILSQRSFPLPPPHKSAQQAELLGLLHGLSSARSWHCLNIFLDSKYLYHYLRTLALGTFQGKSSQAPFQALLPRLLAHKVIYLHHVRSHTNLPDPISKLNALTDALLITPIL

SEQ ID NO: 8036 - protein, 583 aa, synthetic construct
GLEHLPRPPEISQFPLNPERLQALQHLVRKALEAGHIEPYTGPGNNPVFPVKKANGTWRFIHDLRATNSLTVDLSSSSPGPPDLSSLPTTLAHLQTIDLKDAFFQIPLPKQFQPYFAFTVPQQCNYGPGTRYAWKVLPQGFKNSPTLFQMQLASILQPIRQAFPQCVILQYMDDILLASPSPEDLQQLSEATMASLISHGLPVSQDKTQQTPGTIKFLGQIISPNHITYDAVPTVPIRSRWALPELQALLGEIQWVSKGTPTLRQPLHSLYCALQGHTDPRDQIYLNPSQVQSLMQLQQALSQNCRSRLAQTLPLLGAIMLTLTGTTTVVFQSKQQWPLVWLHAPLPHTSQCPWGQLLASAVLLLDKYTLQSYGLLCQTIHHNISIQTFNQFIQTSDHPSVPILLHHSHRFKNLGAQTGELWNTFLKTAAPLAPVKALTPVFTLSPIIINTAPCLFSDGSTSQAAYILWDKHILSQRSFPLPPPHKSAQQAELLGLLHGLSSARSWHCLNIFLDSKYLYHYLRTLAWGTFQGKSSQAPFQALLPRLLAHKVIYLHHVRSHTNLPDPISKLNALTDALLITPIL

SEQ ID NO: 8037 - protein, 583 aa, synthetic construct
GLEHLPRPPEISQFPLNPERLQALQHLVRKALEAGHIEPYTGPGNNPVFPVKKANGTWRFIHDLRATNSLTVDLSSSSPGPPDLSSPPTTLAHLQTIDLKDAFFQIPLPKQFQPYFAFTVPQQCNYGPGTRYAWKVLPQGFKNSPTLFQMQLASILQPIRQAFPQCVILQYMDDILLASPSPEDLQQLSEATMASLISHGLPVSQDKTQQTPGTIKFLGQIISPNHITYDAVPTVPIRSRWALPELQALLGEIQWVSKGTPTLRQPLHSLYCALQGHTDPRDQIYLNPSQVQSLMQLQQALSQNCRSRLAQTLPLLGAIMLTLTGTTTVVFQSKQQWPLVWLHAPLPHTSQCPWGQLLASAVLLLDKYTLQSYGLLCQTIHHNISIQTFNQFIQTSDHPSVPILLHHSHRFKNLGAQTGELWNTFLKTAAPLAPVKALTPVFTLSPIIINTAPCLFSDGSTSQAAYILWDKHILSQRSFPLPPPHKSAQQAELLGLLHGLSSARSWHCLNIFLDSKYLYHYLRTLAWGTFQGKSSQAPFQALLPRLLAHKVIYLHHVRSHTNLPDPISKLNALTDALLITPIL

SEQ ID NO: 8038 - protein, 584 aa, unidentified
GLEHLPPPPEVSQFPLNPERLQALTDLVSRALEAKHIEPYQGPGNNPIFPVKKPNGKWRFIHDLRATNSVTRDLASPSPGPPDLTSLPQGLPHLRTIDLTDAFFQIPLPTIFQPYFAFTLPQPNNYGPGTRYSWRVLPQGFKNSPTLFEQQLSHILTPVRKTFPNSLIIQYMDDILLASPAPGELAALTDKVTNALTKEGLPLSPEKTQATPGPIHFLGQVISQDCITYETLPSINVKSTWSLAELQSMLGELQWVSKGTPVLRSSLHQLYLALRGHRDPRDTIKLTSIQVQALRTIQKALTLNCRSRLVNQLPILALIMLRPTGTTAVLFQTKQKWPLVWLHTPHPATSLRPWGQLLANAVIILDKYSLQHYGQVCKSFHHNISNQALTYYLHTSDQSSVAILLQHSHRFHNLGAQPSGPWRSLLQMPQIFQNIDVLRPPFTISPVVINHAPCLFSDGSASKAAFIIWDRQVIHQQVLSLPSTCSAQAGELFGLLAGLQKSQPWVALNIFLDSKFLIGHLRRMALGAFPGPSTQCELHTQLLPLLQGKTVYVHHVRSHTLLQDPISRLNEATDALMLAPLLPL

SEQ ID NO: 8039 - protein, 584 aa, synthetic construct
GLEHLPPPPEVSQFPLNPERLQALTDLVSRALEAKHIEPYQGPGNNPIFPVKKPNGKWRFIHDLRATNSVTRDLASPSPGPPDLTSLPQGLPHLRTIDLTDAFFQIPLPTIFQPYFAFTLPQPNNYGPGTRYSWRVLPQGFKNSPTLFQQQLSHILTPVRKTFPNSLIIQYMDDILLASPAPGELAALTDKVTNALTKEGLPLSPEKTQATPGPIHFLGQVISQDCITYETLPSINVKSTWSLAELQSMLGELQWVSKGTPVLRSSLHQLYLALRGHRDPRDTIKLTSIQVQALRTIQKALTLNCRSRLVNQLPILALIMLRPTGTTAVLFQTKQKWPLVWLHTPHPATSLRPWGQLLANAVIILDKYSLQHYGQVCKSFHHNISNQALTYYLHTSDQSSVAILLQHSHRFHNLGAQPSGPWRSLLQMPQIFQNIDVLRPPFTISPVVINHAPCLFSDGSASKAAFIIWDRQVIHQQVLSLPSTCSAQAGELFGLLAGLQKSQPWVALNIFLDSKFLIGHLRRMAWGAFPGPSTQCELHTQLLPLLQGKTVYVHHVRSHTLLQDPISRLNEATDALMLAPLLPL

SEQ ID NO: 8040 - protein, 584 aa, synthetic construct
GLEHLPPPPEVSQFPLNPERLQALTDLVSRALEAKHIEPYQGPGNNPIFPVKKPNGKWRFIHDLRATNSVTRDLASPSPGPPDLTSPPQGLPHLRTIDLTDAFFQIPLPTIFQPYFAFTLPQPNNYGPGTRYSWRVLPQGFKNSPTLFQQQLSHILTPVRKTFPNSLIIQYMDDILLASPAPGELAALTDKVTNALTKEGLPLSPEKTQATPGPIHFLGQVISQDCITYETLPSINVKSTWSLAELQSMLGELQWVSKGTPVLRSSLHQLYLALRGHRDPRDTIKLTSIQVQALRTIQKALTLNCRSRLVNQLPILALIMLRPTGTTAVLFQTKQKWPLVWLHTPHPATSLRPWGQLLANAVIILDKYSLQHYGQVCKSFHHNISNQALTYYLHTSDQSSVAILLQHSHRFHNLGAQPSGPWRSLLQMPQIFQNIDVLRPPFTISPVVINHAPCLFSDGSASKAAFIIWDRQVIHQQVLSLPSTCSAQAGELFGLLAGLQKSQPWVALNIFLDSKFLIGHLRRMAWGAFPGPSTQCELHTQLLPLLQGKTVYVHHVRSHTLLQDPISRLNEATDALMLAPLLPL

SEQ ID NO: 8041 - protein, 584 aa, unidentified
GLEHLPPPPEVSQFPLNPERLQALTDLVSRALEAKHIEPYQGPGNNPIFPVKKPNGKWRFIHDLRATNSLTRDLASPSPGPPDLTSLPQDLPHLRTIDLTDAFFQIPLPAVFQPYFAFTLPQPNNHGPGTRYSWRVLPQGFKNSPTLFEQQLSHILAPVRKAFPNSLIIQYMDDILLASPALRELTALTDKVTNALTKEGLPMSLEKTQATPGSIHFLGQVISPDCITYETLPSIHVKSIWSLAELQSMLGELQWVSKGTPVLRSSLHQLYLALRGHRDPRDTIELTSTQVQALKTIQKALALNCRSRLVSQLPILALIILRPTGTTAVLFQTKQKWPLVWLHTPHPATSLRPWGQLLANAIITLDKYSLQHYGQICKSFHHNISNQALTYYLHTSDQSSVAILLQHSHRFHNLGAQPSGPWRSLLQVPQIFQNIDVLRPPFIISPVVIDHAPCLFSDGATSKAAFILWDKQVIHQQVLPLPSTCSAQAGELFGLLAGLQKSKPWPALNIFLDSKFLIGHLRRMALGAFLGPSTQCDLHARLFPLLQGKTVYVHHVRSHTLLQDPISRLNEATDALMLAPLLPL

SEQ ID NO: 8042 - protein, 584 aa, synthetic construct
GLEHLPPPPEVSQFPLNPERLQALTDLVSRALEAKHIEPYQGPGNNPIFPVKKPNGKWRFIHDLRATNSLTRDLASPSPGPPDLTSLPQDLPHLRTIDLTDAFFQIPLPAVFQPYFAFTLPQPNNHGPGTRYSWRVLPQGFKNSPTLFQQQLSHILAPVRKAFPNSLIIQYMDDILLASPALRELTALTDKVTNALTKEGLPMSLEKTQATPGSIHFLGQVISPDCITYETLPSIHVKSIWSLAELQSMLGELQWVSKGTPVLRSSLHQLYLALRGHRDPRDTIELTSTQVQALKTIQKALALNCRSRLVSQLPILALIILRPTGTTAVLFQTKQKWPLVWLHTPHPATSLRPWGQLLANAIITLDKYSLQHYGQICKSFHHNISNQALTYYLHTSDQSSVAILLQHSHRFHNLGAQPSGPWRSLLQVPQIFQNIDVLRPPFIISPVVIDHAPCLFSDGATSKAAFILWDKQVIHQQVLPLPSTCSAQAGELFGLLAGLQKSKPWPALNIFLDSKFLIGHLRRMAWGAFLGPSTQCDLHARLFPLLQGKTVYVHHVRSHTLLQDPISRLNEATDALMLAPLLPL

SEQ ID NO: 8043 - protein, 584 aa, synthetic construct
GLEHLPPPPEVSQFPLNPERLQALTDLVSRALEAKHIEPYQGPGNNPIFPVKKPNGKWRFIHDLRATNSLTRDLASPSPGPPDLTSPPQDLPHLRTIDLTDAFFQIPLPAVFQPYFAFTLPQPNNHGPGTRYSWRVLPQGFKNSPTLFQQQLSHILAPVRKAFPNSLIIQYMDDILLASPALRELTALTDKVTNALTKEGLPMSLEKTQATPGSIHFLGQVISPDCITYETLPSIHVKSIWSLAELQSMLGELQWVSKGTPVLRSSLHQLYLALRGHRDPRDTIELTSTQVQALKTIQKALALNCRSRLVSQLPILALIILRPTGTTAVLFQTKQKWPLVWLHTPHPATSLRPWGQLLANAIITLDKYSLQHYGQICKSFHHNISNQALTYYLHTSDQSSVAILLQHSHRFHNLGAQPSGPWRSLLQVPQIFQNIDVLRPPFIISPVVIDHAPCLFSDGATSKAAFILWDKQVIHQQVLPLPSTCSAQAGELFGLLAGLQKSKPWPALNIFLDSKFLIGHLRRMAWGAFLGPSTQCDLHARLFPLLQGKTVYVHHVRSHTLLQDPISRLNEATDALMLAPLLPL

SEQ ID NO: 8044 - protein, 584 aa, synthetic construct
HLPPPPQVDQFPLNLPERLQALNDLVSKALEAGHIEPYSGPGNNPVFPVKKPNGKWRFIHDLRATNAITTTLTSPSPGPPDLTSLPTALPHLQTIDLTDAFFQIPLPKQYQPYFAFTIPQPCNYGPGTRYAWTVLPQGFKNSPTLFQQQLAAVLNPMRKMFPTSTIVQYMDDILLASPTNEELQQLSQLTLQALTTHGLPISQEKTQQTPGQIRFLGQVISPNHITYESTPTIPIKSQWTLTELQVILGEIQWVSKGTPILRKHLQSLYSALHPYRDPRACITLTPQQLHALHAIQQALQHNCRGRLNPALPLLGLISLSTSGTTSVIFQPKQNWPLAWLHTPHPPTSLCPWGHLLACTILTLDKYTLQHYGQLCQSFHHNMSKQALCDFLRNSPHPSVGILIHHMGRFHNLGSQPSGPWKTLLHLPTLLQEPRLLRPIFTLSPVVLDTAPCLFSDGSPQKAAYVLWDQTILQQDITPLPSHETHSAQKGELLALICGLRAAKPWPSLNIFLDSKYLIKYLHSLAIGAFLGTSAHQTLQAALPPLLQGKTIYLHHVRSHTNLPDPISTFNEYTDSLILAPLVPL

SEQ ID NO: 8045 - protein, 581 aa, Jaagsiekte sheep retrovirus
PLGTSDSPVTHADPIDWKSEEPVWVDQWPLTQEKLSAAQQLVQEQLRLGHIEPSTSAWNSPIFVIKKKSGKWRLLQDLRKVNETMMHMGALQPGLPTPSAIPDKSYIIVIDLKDCFYTIPLAPQDCKRFAFSLPSVNFKEPMQRYQWRVLPQGMTNSPTLCQKFVATAIAPVRQRFPQLYLVHYMDDILLAHTDEHLLYQAFSILKQHLSLNGLVIADEKIQTHFPYNYLGFSLYPRVYNTQLVKLQTDHLKTLNDFQKLLGDINWIRPYLKLPTYTLQPLFDILKGDSDPASPRTLSLEGRTALQSIEEAIRQQQITYCDYQRSWGLYILPTPRAPTGVLYQDKPLRWIYLSATPTKHLLPYYELVAKIIAKGRHEAIQYFGMEPPFICVPYALEQQDWLFQFSDNWSIAFANYPGQITHHYPSDKLLQFASSHAFIFPKIVRRQPIPEATLIFTDGSSNGTAALIINHQTYYAQTSFSSAQVVELFAVHQALLTVPTSFNLFTDSSYVVGALQMIETVPIIGTTSPEVLNLFTLIQQVLHCRQHPCFFGHIRAHSTLPGALVQGNHTADVLTKQVFFQS

SEQ ID NO: 8046 - protein, 581 aa, synthetic construct
PLGTSDSPVTHADPIDWKSEEPVWVDQWPLTQEKLSAAQQLVQEQLRLGHIEPSTSAWNSPIFVIKKKSGKWRLLQDLRKVNETMMHMGALQPGLPTPSPIPDKSYIIVIDLKDCFYTIPLAPQDCKRFAFSLPSVNFKEPMQRYQWRVLPQGMTNSPTLCQKFVATAIAPVRQRFPQLYLVHYMDDILLAHTDEHLLYQAFSILKQHLSLNGLVIADEKIQTHFPYNYLGFSLYPRVYNTQLVKLQTDHLKTLNDFQKLLGDINWIRPYLKLPTYTLQPLFDILKGDSDPASPRTLSLEGRTALQSIEEAIRQQQITYCDYQRSWGLYILPTPRAPTGVLYQDKPLRWIYLSATPTKHLLPYYELVAKIIAKGRHEAIQYFGMEPPFICVPYALEQQDWLFQFSDNWSIAFANYPGQITHHYPSDKLLQFASSHAFIFPKIVRRQPIPEATLIFTDGSSNGTAALIINHQTYYAQTSFSSAQVVELFAVHQALLTVPTSFNLFTDSSYVVGALQMIETVPIIGTTSPEVLNLFTLIQQVLHCRQHPCFFGHIRAHSTLPGALVQGNHTADVLTKQVFFQS

SEQ ID NO: 8047 - protein, 793 aa, Koala retrovirus
TLGDQGSRGSDPLPEPRVTLTVEGIPTEFLVNTGAEHSVLTKPMGKMGSKRTVVAGATGSKVYPWTTKRLLKIGQKQVTHSFLVIPECPAPLLGRDLLTKLKAQIQFSTEGPQVTWEDRPAMCLVLNLEEEYRLHEKPVPPSIDPSWLQLFPMVWAEKAGMGLANQVPPVVVELKSDASPVAVRQYPMSKEAREGIRPHIQRFLDLGILVPCQSPWNTPLLPVKKPGTNDYRPVQDLREVNKRVQDIHPTVPNPYNLLSSLPPSHTWYSVLDLKDAFFCLKLHPNSQPLFAFEWRDPEKGNTGQLTWTRLPQGFKNSPTLFDEALHRDLASFRALNPQVVMLQYVDDLLVAAPTYRDCKEGTRRLLQELSKLGYRVSAKKAQLCREEVTYLGYLLKGGKRWLTPARKATVMKIPTPTTPRQVREFLGTAGFCRLWIPGFASLAAPLYPLTREKVPFTWTEAHQEAFGRIKEALLSAPALALPDLTKPFALYVDEKEGVARGVLTQTLGPWRRPVAYLSKKLDPVASGWPTCLKAIAAVALLLKDADKLTLGQNVLVIAPHNLESIVRQPPDRWMTNARMTHYQSLLLNERVSFAPPAILNPATLLPVESDDTPIHICSEILAEETGTRPDLRDQPLPGVPAWYTDGSSFIMDGRRQAGAAIVDNKRTVWASNLPEGTSAQKAELIALTQALRLAEGKSINIYTDSRYAFATAHVHGAIYKQRGLLTSAGKDIKNKEEILALLEAIHLPKRVAIIHCPGHQRGTDPVATGNRKADEAAKQAAQSTRILTETTKN

SEQ ID NO: 8048 - protein, 793 aa, synthetic construct
TLGDQGSRGSDPLPEPRVTLTVEGIPTEFLVNTGAEHSVLTKPMGKMGSKRTVVAGATGSKVYPWTTKRLLKIGQKQVTHSFLVIPECPAPLLGRDLLTKLKAQIQFSTEGPQVTWEDRPAMCLVLNLEEEYRLHEKPVPPSIDPSWLQLFPMVWAEKAGMGLANQVPPVVVELKSDASPVAVRQYPMSKEAREGIRPHIQRFLDLGILVPCQSPWNTPLLPVKKPGTNDYRPVQDLREVNKRVQDIHPTVPNPYNLLSSLPPSHTWYSVLDLKDAFFCLKLHPNSQPLFAFEWRDPEKGNTGQLTWTRLPQGFKNSPTLFNEALHRDLASFRALNPQVVMLQYVDDLLVAAPTYRDCKEGTRRLLQELSKLGYRVSAKKAQLCREEVTYLGYLLKGGKRWLTPARKATVMKIPTPTTPRQVREFLGTAGFCRLWIPGFASLAAPLYPLTRPKVPFTWTEAHQEAFGRIKEALLSAPALALPDLTKPFALYVDEKEGVARGVLTQTLGPWRRPVAYLSKKLDPVASGWPTCLKAIAAVALLLKDADKLTLGQNVLVIAPHNLESIVRQPPDRWMTNARMTHYQSLLLNERVSFAPPAILNPATLLPVESDDTPIHICSEILAEETGTRPDLRDQPLPGVPAWYTDGSSFIMDGRRQAGAAIVDNKRTVWASNLPEGTSAQKAELIALTQALRLAEGKSINIYTDSRYAFATAHVHGAIYKQRGWLTSAGKDIKNKEEILALLEAIHLPKRVAIIHCPGHQRGTDPVATGNRKADEAAKQAAQSTRILTETTKN

SEQ ID NO: 8049 - protein, 793 aa, synthetic construct
TLGDQGSRGSDPLPEPRVTLTVEGIPTEFLVNTGAEHSVLTKPMGKMGSKRTVVAGATGSKVYPWTTKRLLKIGQKQVTHSFLVIPECPAPLLGRDLLTKLKAQIQFSTEGPQVTWEDRPAMCLVLNLEEEYRLHEKPVPPSIDPSWLQLFPMVWAEKAGMGLANQVPPVVVELKSDASPVAVRQYPMSKEAREGIRPHIQRFLDLGILVPCQSPWNTPLLPVKKPGTNDYRPVQDLREVNKRVQDIHPTVPNPYNLLSSLPPSHTWYSVLDLKDAFFCLKLHPNSQPLFAFEWRDPEKGNTGQLTWTRLPQGFKNSPTLFNEALHRDLASFRALNPQVVMLQYVDDLLVAAPTYRDCKEGTRRLLQELSKLGYRVSAKKAQLCREEVTYLGYLLKGGKRWLTPARKATVMKIPTPTTPRQVREFLGKAGFCRLFIPGFASLAAPLYPLTRPKVPFTWTEAHQEAFGRIKEALLSAPALALPDLTKPFALYVDEKEGVARGVLTQTLGPWRRPVAYLSKKLDPVASGWPTCLKAIAAVALLLKDADKLTLGQNVLVIAPHNLESIVRQPPDRWMTNARMTHYQSLLLNERVSFAPPAILNPATLLPVESDDTPIHICSEILAEETGTRPDLRDQPLPGVPAWYTDGSSFIMDGRRQAGAAIVDNKRTVWASNLPEGTSAQKAELIALTQALRLAEGKSINIYTDSRYAFATAHVHGAIYKQRGWLTSAGKDIKNKEEILALLEAIHLPKRVAIIHCPGHQRGTDPVATGNRKADEAAKQAAQSTRILTETTKN

SEQ ID NO: 8050 - protein, 702 aa, Koala retrovirus
LLGRDLLTKLKAQIQFSTEGPQVTWEDRPAMCLVLNLEEEYRLHEKPVPPSIDPSWLQLFPMVWAEKAGMGLANQVPPVVVELKSDASPVAVRQYPMSKEAREGIRPHIQRFLDLGILVPCQSPWNTPLLPVKKPGTNDYRPVQDLREVNKRVQDIHPTVPNPYNLLSSLPPSHTWYSVLDLKDAFFCLKLHPNSQPLFAFEWRDPEKGNTGQLTWTRLPQGFKNSPTLFDEALHRDLASFRALNPQVVMLQYVDDLLVAAPTYRDCKEGTRRLLQELSKLGYRVSAKKAQLCREEVTYLGYLLKGGKRWLTPARKATVMKIPTPTTPRQVREFLGTAGFCRLWIPGFASLAAPLYPLTREKVPFTWTEAHQEAFGRIKEALLSAPALALPDLTKPFALYVDEKEGVARGVLTQTLGPWRRPVAYLSKKLDPVASGWPTCLKAIAAVALLLKDADKLTLGQNVLVIAPHNLESIVRQPPDRWMTNARMTHYQSLLLNERVSFAPPAILNPATLLPVESDDTPIHICSEILAEETGTRPDLRDQPLPGVPAWYTDGSSFIMDGRRQAGAAIVDNKRTVWASNLPEGTSAQKAELIALTQALRLAEGKSINIYTDSRYAFATAHVHGAIYKQRGLLTSAGKDIKNKEEILALLEAIHLPKRVAIIHCPGHQRGTDPVATGNRKADEAAKQAAQSTRILTETTKN

SEQ ID NO: 8051 - protein, 702 aa, synthetic construct
LLGRDLLTKLKAQIQFSTEGPQVTWEDRPAMCLVLNLEEEYRLHEKPVPPSIDPSWLQLFPMVWAEKAGMGLANQVPPVVVELKSDASPVAVRQYPMSKEAREGIRPHIQRFLDLGILVPCQSPWNTPLLPVKKPGTNDYRPVQDLREVNKRVQDIHPTVPNPYNLLSSLPPSHTWYSVLDLKDAFFCLKLHPNSQPLFAFEWRDPEKGNTGQLTWTRLPQGFKNSPTLFNEALHRDLASFRALNPQVVMLQYVDDLLVAAPTYRDCKEGTRRLLQELSKLGYRVSAKKAQLCREEVTYLGYLLKGGKRWLTPARKATVMKIPTPTTPRQVREFLGTAGFCRLWIPGFASLAAPLYPLTRPKVPFTWTEAHQEAFGRIKEALLSAPALALPDLTKPFALYVDEKEGVARGVLTQTLGPWRRPVAYLSKKLDPVASGWPTCLKAIAAVALLLKDADKLTLGQNVLVIAPHNLESIVRQPPDRWMTNARMTHYQSLLLNERVSFAPPAILNPATLLPVESDDTPIHICSEILAEETGTRPDLRDQPLPGVPAWYTDGSSFIMDGRRQAGAAIVDNKRTVWASNLPEGTSAQKAELIALTQALRLAEGKSINIYTDSRYAFATAHVHGAIYKQRGWLTSAGKDIKNKEEILALLEAIHLPKRVAIIHCPGHQRGTDPVATGNRKADEAAKQAAQSTRILTETTKN

SEQ ID NO: 8052 - protein, 702 aa, synthetic construct
LLGRDLLTKLKAQIQFSTEGPQVTWEDRPAMCLVLNLEEEYRLHEKPVPPSIDPSWLQLFPMVWAEKAGMGLANQVPPVVVELKSDASPVAVRQYPMSKEAREGIRPHIQRFLDLGILVPCQSPWNTPLLPVKKPGTNDYRPVQDLREVNKRVQDIHPTVPNPYNLLSSLPPSHTWYSVLDLKDAFFCLKLHPNSQPLFAFEWRDPEKGNTGQLTWTRLPQGFKNSPTLFNEALHRDLASFRALNPQVVMLQYVDDLLVAAPTYRDCKEGTRRLLQELSKLGYRVSAKKAQLCREEVTYLGYLLKGGKRWLTPARKATVMKIPTPTTPRQVREFLGKAGFCRLFIPGFASLAAPLYPLTRPKVPFTWTEAHQEAFGRIKEALLSAPALALPDLTKPFALYVDEKEGVARGVLTQTLGPWRRPVAYLSKKLDPVASGWPTCLKAIAAVALLLKDADKLTLGQNVLVIAPHNLESIVRQPPDRWMTNARMTHYQSLLLNERVSFAPPAILNPATLLPVESDDTPIHICSEILAEETGTRPDLRDQPLPGVPAWYTDGSSFIMDGRRQAGAAIVDNKRTVWASNLPEGTSAQKAELIALTQALRLAEGKSINIYTDSRYAFATAHVHGAIYKQRGWLTSAGKDIKNKEEILALLEAIHLPKRVAIIHCPGHQRGTDPVATGNRKADEAAKQAAQSTRILTETTKN

SEQ ID NO: 8053 - protein, 671 aa, unidentified
TLNLEDEYRLYETSAEPEVSPGSTWLSDFPQAWAETGGMGLAVRQAPLIIPLKATSTPVSIKQYPMSQEAKLGIKPHIQRLLDQGILVPCQSPWNTPLLPVKKPGTNDYRPVQDLREVNKRVEDIHPTVPNPYNLLSGLPPSHRWYTVLDLKDAFFCLRLHPTSQPLFAFEWRDPGMGISGQLTWTRLPQGFKNSPTLFDEALHRDLADFRIQHPDLILLQYVDDILLAATSELDCQQGTRALLLTLGNLGYRASAKKAQLCQKQVKYLGYLLKEGQRWLTEARKETVMGQPTPKTPRQLREFLGTAGFCRLWIPGFAEMAAPLYPLTKTGTLFNWGPDQQKAYQEIKQALLTAPALGLPDLTKPFELFVDEKQGYAKGVLTQKLGPWRRPVAYLSKKLDPVAAGWPPCLRMVAAIAVLRKDAGKLTMGQPLVILAPHAVEALVKQPPDRWLSNARMTHYQAMLLDTDRVQFGPVVALNPATLLPLPEEGAPHDCLEILAETHGTRPDLTDQPIPDADHTWYTDGSSFLQEGQRKAGAAVTTETEVIWARALPAGTSAQRAELIALTQALKMAEGKRLNVYTDSRYAFATAHIHGEIYRRRGLLTSEGREIKNKSEILALLKALFLPKRLSIIHCLGHQKGDSAEARGNRLADQAAREAAIKTPPDTSTLL

SEQ ID NO: 8054 - protein, 671 aa, synthetic construct
TLNLEDEYRLYETSAEPEVSPGSTWLSDFPQAWAETGGMGLAVRQAPLIIPLKATSTPVSIKQYPMSQEAKLGIKPHIQRLLDQGILVPCQSPWNTPLLPVKKPGTNDYRPVQDLREVNKRVEDIHPTVPNPYNLLSGLPPSHRWYTVLDLKDAFFCLRLHPTSQPLFAFEWRDPGMGISGQLTWTRLPQGFKNSPTLFNEALHRDLADFRIQHPDLILLQYVDDILLAATSELDCQQGTRALLLTLGNLGYRASAKKAQLCQKQVKYLGYLLKEGQRWLTEARKETVMGQPTPKTPRQLREFLGTAGFCRLWIPGFAEMAAPLYPLTKPGTLFNWGPDQQKAYQEIKQALLTAPALGLPDLTKPFELFVDEKQGYAKGVLTQKLGPWRRPVAYLSKKLDPVAAGWPPCLRMVAAIAVLRKDAGKLTMGQPLVILAPHAVEALVKQPPDRWLSNARMTHYQAMLLDTDRVQFGPVVALNPATLLPLPEEGAPHDCLEILAETHGTRPDLTDQPIPDADHTWYTDGSSFLQEGQRKAGAAVTTETEVIWARALPAGTSAQRAELIALTQALKMAEGKRLNVYTDSRYAFATAHIHGEIYRRRGWLTSEGREIKNKSEILALLKALFLPKRLSIIHCLGHQKGDSAEARGNRLADQAAREAAIKTPPDTSTLL

SEQ ID NO: 8055 - protein, 671 aa, synthetic construct
TLNLEDEYRLYETSAEPEVSPGSTWLSDFPQAWAETGGMGLAVRQAPLIIPLKATSTPVSIKQYPMSQEAKLGIKPHIQRLLDQGILVPCQSPWNTPLLPVKKPGTNDYRPVQDLREVNKRVEDIHPTVPNPYNLLSGLPPSHRWYTVLDLKDAFFCLRLHPTSQPLFAFEWRDPGMGISGQLTWTRLPQGFKNSPTLFNEALHRDLADFRIQHPDLILLQYVDDILLAATSELDCQQGTRALLLTLGNLGYRASAKKAQLCQKQVKYLGYLLKEGQRWLTEARKETVMGQPTPKTPRQLREFLGKAGFCRLFIPGFAEMAAPLYPLTKPGTLFNWGPDQQKAYQEIKQALLTAPALGLPDLTKPFELFVDEKQGYAKGVLTQKLGPWRRPVAYLSKKLDPVAAGWPPCLRMVAAIAVLRKDAGKLTMGQPLVILAPHAVEALVKQPPDRWLSNARMTHYQAMLLDTDRVQFGPVVALNPATLLPLPEEGAPHDCLEILAETHGTRPDLTDQPIPDADHTWYTDGSSFLQEGQRKAGAAVTTETEVIWARALPAGTSAQRAELIALTQALKMAEGKRLNVYTDSRYAFATAHIHGEIYRRRGWLTSEGREIKNKSEILALLKALFLPKRLSIIHCLGHQKGDSAEARGNRLADQAAREAAIKTPPDTSTLL

SEQ ID NO: 8056 - protein, 671 aa, Murine leukemia virus
TLGIEDEYRLHETSTEPDVSLGSTWLSDFPQAWAETGGMGLAVRQAPLIIPLKATSTPVSIQQYPMSHEARLGIKPHIQRLLDQGILVPCQSPWNTPLLPVKKPGTNDYRPVQDLREVNKRVEDIHPTVPNPYNLLSGLPPSHQWYTVLDLKDAFFCLRLHPTSQPLFAFEWRDPGMGISGQLTWTRLPQGFKNSPTLFDEALHRDLADFRIQHPDLILLQYVDDILLAATSELDCQQGTRALLQTLGDLGYRASAKKAQICQKQVKYLGYLLREGQRWLTEARKETVMGQPVPKTPRQLREFLGTAGFCRLWIPGFAEMAAPLYPLTKTGTLFSWGPDQQKAYQEIKQALLTAPALGLPDLTKPFELFVDEKQGYAKGVLTQKLGPWRRPVAYLSKKLDPVAAGWPPCLRMVAAIAVLTKDAGKLTMGQPLVILAPHAVEALVKQPPDRWLSNARMTHYQAMLLDTDRVQFGPVVALNPATLLPLPEEGAPHDCLEILAETHGTRPDLTDQPIPDADHTWYTDGSSFLQEGQRKAGAAVTTETEVIWAGALPAGTSAQRAELIALTQALKMAEGKRLNVYTDSRYAFATAHIHGEIYRRRGLLTSEGREIKNKSEILALLKALFLPKRLSIIHCLGHQKGDSAEARGNRLADQAAREAAIKTPPDTSTLL

SEQ ID NO: 8057 - protein, 671 aa, Murine leukemia virus; identical to SEQ ID NO: 8056

SEQ ID NO: 8058 - protein, 671 aa, synthetic construct
TLGIEDEYRLHETSTEPDVSLGSTWLSDFPQAWAETGGMGLAVRQAPLIIPLKATSTPVSIQQYPMSHEARLGIKPHIQRLLDQGILVPCQSPWNTPLLPVKKPGTNDYRPVQDLREVNKRVEDIHPTVPNPYNLLSGLPPSHQWYTVLDLKDAFFCLRLHPTSQPLFAFEWRDPGMGISGQLTWTRLPQGFKNSPTLFNEALHRDLADFRIQHPDLILLQYVDDILLAATSELDCQQGTRALLQTLGDLGYRASAKKAQICQKQVKYLGYLLREGQRWLTEARKETVMGQPVPKTPRQLREFLGTAGFCRLWIPGFAEMAAPLYPLTKPGTLFSWGPDQQKAYQEIKQALLTAPALGLPDLTKPFELFVDEKQGYAKGVLTQKLGPWRRPVAYLSKKLDPVAAGWPPCLRMVAAIAVLTKDAGKLTMGQPLVILAPHAVEALVKQPPDRWLSNARMTHYQAMLLDTDRVQFGPVVALNPATLLPLPEEGAPHDCLEILAETHGTRPDLTDQPIPDADHTWYTDGSSFLQEGQRKAGAAVTTETEVIWAGALPAGTSAQRAELIALTQALKMAEGKRLNVYTDSRYAFATAHIHGEIYRRRGWLTSEGREIKNKSEILALLKALFLPKRLSIIHCLGHQKGDSAEARGNRLADQAAREAAIKTPPDTSTLL

SEQ ID NO: 8059 - protein, 671 aa, synthetic construct; identical to SEQ ID NO: 8058

SEQ ID NO: 8060 - protein, 671 aa, synthetic construct
LGIEDEYRLHETSTEPDVSLGSTWLSDFPQAWAETGGMGLAVRQAPLIIPLKATSTPVSIQQYPMSHEARLGIKPHIQRLLDQGILVPCQSPWNTPLLPVKKPGTNDYRPVQDLREVNKRVEDIHPTVPNPYNLLSGLPPSHQWYTVLDLKDAFFCLRLHPTSQPLFAFEWRDPGMGISGQLTWTRLPQGFKNSPTLFNEALHRDLADFRIQHPDLILLQYVDDILLAATSELDCQQGTRALLQTLGDLGYRASAKKAQICQKQVKYLGYLLREGQRWLTEARKETVMGQPVPKTPRQLREFLGKAGFCRLFIPGFAEMAAPLYPLTKPGTLFSWGPDQQKAYQEIKQALLTAPALGLPDLTKPFELFVDEKQGYAKGVLTQKLGPWRRPVAYLSKKLDPVAAGWPPCLRMVAAIAVLTKDAGKLTMGQPLVILAPHAVEALVKQPPDRWLSNARMTHYQAMLLDTDRVQFGPVVALNPATLLPLPEEGAPHDCLEILAETHGTRPDLTDQPIPDADHTWYTDGSSFLQEGQRKAGAAVTTETEVIWAGALPAGTSAQRAELIALTQALKMAEGKRLNVYTDSRYAFATAHIHGEIYRRRGWLTSEGREIKNKSEILALLKALFLPKRLSIIHCLGHQKGDSAEARGNRLADQAAREAAIKTPPDTSTLLI

SEQ ID NO: 8061 - protein, 671 aa, synthetic construct; identical to SEQ ID NO: 8060

SEQ ID NO: 8062 - protein, 671 aa, unidentified
TLNIEDEYRLHETSKEPDVSLGSTWLSDFPQAWAETGGMGLAVRQAPLIIPLKATSTPVSIKQYPMSQEARLGIKPHIQRLLDQGILVPCQSPWNTPLLPVKKPGTNDYRPVQDLREVNKRVEDIHPTVPNPYNLLSGLPPSHQWYTVLDLKDAFFCLRLHPTSQPLFAFEWRDPEMGISGQLTWTRLPQGFKNSPTLFDEALHRDLAGFRIQHPDLILLQYVDDLLLAATSELDCQQGTRALLQTLGDLGYRASAKKAQICQKQVKYLGYLLKEGQRWLTEARKETVMGQPIPKTPRQLREFLGTAGFCRLWIPGFAEMAAPLYPLTKTGTLFNWGPDQQKAFQEIKQALLTAPALGLPDLTKPFELFVDEKQGYAKGVLTQKLGPWRRPVAYLSKKLDPVAAGWPPCLRMVAAIAVLTKDAGKLTMGQPLVILAPHAVEALVKQPPDRWLSNARMTHYQALLLDTDRVQFGPVVALNPATLLPLPEEGLQHDCLDILAEAHGTRSDLMDQPLPDADHTWYTDGSSFLQEGQRKAGAAVTTETEVIWARALPAGTSAQRAELIALTQALKMAEGKKLNVYTDSRYAFATAHIHGEIYRRRGLLTSEGKEIKNKDEILALLKALFLPKRLSIIHCPGHQKGNSAEARGNRMADQAAREVATRETPETSTLL

SEQ ID NO: 8063 - protein, 671 aa, synthetic construct
TLNIEDEYRLHETSKEPDVSLGSTWLSDFPQAWAETGGMGLAVRQAPLIIPLKATSTPVSIKQYPMSQEARLGIKPHIQRLLDQGILVPCQSPWNTPLLPVKKPGTNDYRPVQDLREVNKRVEDIHPTVPNPYNLLSGLPPSHQWYTVLDLKDAFFCLRLHPTSQPLFAFEWRDPEMGISGQLTWTRLPQGFKNSPTLFNEALHRDLAGFRIQHPDLILLQYVDDLLLAATSELDCQQGTRALLQTLGDLGYRASAKKAQICQKQVKYLGYLLKEGQRWLTEARKETVMGQPIPKTPRQLREFLGTAGFCRLWIPGFAEMAAPLYPLTKPGTLFNWGPDQQKAFQEIKQALLTAPALGLPDLTKPFELFVDEKQGYAKGVLTQKLGPWRRPVAYLSKKLDPVAAGWPPCLRMVAAIAVLTKDAGKLTMGQPLVILAPHAVEALVKQPPDRWLSNARMTHYQALLLDTDRVQFGPVVALNPATLLPLPEEGLQHDCLDILAEAHGTRSDLMDQPLPDADHTWYTDGSSFLQEGQRKAGAAVTTETEVIWARALPAGTSAQRAELIALTQALKMAEGKKLNVYTDSRYAFATAHIHGEIYRRRGWLTSEGKEIKNKDEILALLKALFLPKRLSIIHCPGHQKGNSAEARGNRMADQAAREVATRETPETSTLL

SEQ ID NO: 8064 - protein, 671 aa, synthetic construct
TLNIEDEYRLHETSKEPDVSLGSTWLSDFPQAWAETGGMGLAVRQAPLIIPLKATSTPVSIKQYPMSQEARLGIKPHIQRLLDQGILVPCQSPWNTPLLPVKKPGTNDYRPVQDLREVNKRVEDIHPTVPNPYNLLSGLPPSHQWYTVLDLKDAFFCLRLHPTSQPLFAFEWRDPEMGISGQLTWTRLPQGFKNSPTLFNEALHRDLAGFRIQHPDLILLQYVDDLLLAATSELDCQQGTRALLQTLGDLGYRASAKKAQICQKQVKYLGYLLKEGQRWLTEARKETVMGQPIPKTPRQLREFLGKAGFCRLFIPGFAEMAAPLYPLTKPGTLFNWGPDQQKAFQEIKQALLTAPALGLPDLTKPFELFVDEKQGYAKGVLTQKLGPWRRPVAYLSKKLDPVAAGWPPCLRMVAAIAVLTKDAGKLTMGQPLVILAPHAVEALVKQPPDRWLSNARMTHYQALLLDTDRVQFGPVVALNPATLLPLPEEGLQHDCLDILAEAHGTRSDLMDQPLPDADHTWYTDGSSFLQEGQRKAGAAVTTETEVIWARALPAGTSAQRAELIALTQALKMAEGKKLNVYTDSRYAFATAHIHGEIYRRRGWLTSEGKEIKNKDEILALLKALFLPKRLSIIHCPGHQKGNSAEARGNRMADQAAREVATRETPETSTLL

SEQ ID NO: 8065 - protein, 671 aa, unidentified
TLNIEDEYRLHETSKGPDVPLGSTWLSDFPQAWAETGGMGLAFRQAPLIISLKATSTPVSIKQYPMSQEARLGIKPHIQRLLDQGILVPCQSPWNTPLLPVKKPGTNDYRPVQDLREVNKRVEDIHPTVPNPYNLLSGLPPSHQWYTVLDLKDAFFCLRLHPTSQSLFAFEWKDPEMGISGQLTWTRLPQGFKNSPTLFDEALHRDLADFRIQHPDLILLQYVDDLLLAATSELDCQQGTRALLQTLGDLGYRASAKKAQICQKQVKYLGYLLKEGQRWLTEARKETVMGQPTPKTPRQLREFLGTAGLCRLWIPGFAEMAAPLYPLTKTGTLFKWGPDQQKAYQEIKQALLTAPALGLPDLTKPFELFVDEKQGYAKGVLTQKLGPWRRPVAYLSKKLDPVAAGWPPCLRMVAAIAVLTKDVGKLTMGQPLVILAPHAVEALVKQPPDRWLSNARMTHYQALLLDTDRVQFGPIVALNPATLLPLPEEGLQHDCLDILAEAHGTRPDLTDQPLPDADHTWYTDGSSFLQEGQRRAGAAVTTETEVIWAKALPAGTSAQRAELIALTQALKMAAGKKLNVYTDSRYAFATAHIHGEIYRRRGLLTSEGKEIKNKDEILALLKALFLPKRLSIIHCPGHQKGNHAEARGNRMADQAAREVATRETPETSTLL

SEQ ID NO: 8066 - protein, 671 aa, synthetic construct
TLNIEDEYRLHETSKGPDVPLGSTWLSDFPQAWAETGGMGLAFRQAPLIISLKATSTPVSIKQYPMSQEARLGIKPHIQRLLDQGILVPCQSPWNTPLLPVKKPGTNDYRPVQDLREVNKRVEDIHPTVPNPYNLLSGLPPSHQWYTVLDLKDAFFCLRLHPTSQSLFAFEWKDPEMGISGQLTWTRLPQGFKNSPTLFNEALHRDLADFRIQHPDLILLQYVDDLLLAATSELDCQQGTRALLQTLGDLGYRASAKKAQICQKQVKYLGYLLKEGQRWLTEARKETVMGQPTPKTPRQLREFLGTAGLCRLWIPGFAEMAAPLYPLTKPGTLFKWGPDQQKAYQEIKQALLTAPALGLPDLTKPFELFVDEKQGYAKGVLTQKLGPWRRPVAYLSKKLDPVAAGWPPCLRMVAAIAVLTKDVGKLTMGQPLVILAPHAVEALVKQPPDRWLSNARMTHYQALLLDTDRVQFGPIVALNPATLLPLPEEGLQHDCLDILAEAHGTRPDLTDQPLPDADHTWYTDGSSFLQEGQRRAGAAVTTETEVIWAKALPAGTSAQRAELIALTQALKMAAGKKLNVYTDSRYAFATAHIHGEIYRRRGWLTSEGKEIKNKDEILALLKALFLPKRLSIIHCPGHQKGNHAEARGNRMADQAAREVATRETPETSTLL

SEQ ID NO: 8067 - protein, 671 aa, synthetic construct
TLNIEDEYRLHETSKGPDVPLGSTWLSDFPQAWAETGGMGLAFRQAPLIISLKATSTPVSIKQYPMSQEARLGIKPHIQRLLDQGILVPCQSPWNTPLLPVKKPGTNDYRPVQDLREVNKRVEDIHPTVPNPYNLLSGLPPSHQWYTVLDLKDAFFCLRLHPTSQSLFAFEWKDPEMGISGQLTWTRLPQGFKNSPTLFNEALHRDLADFRIQHPDLILLQYVDDLLLAATSELDCQQGTRALLQTLGDLGYRASAKKAQICQKQVKYLGYLLKEGQRWLTEARKETVMGQPTPKTPRQLREFLGKAGLCRLFIPGFAEMAAPLYPLTKPGTLFKWGPDQQKAYQEIKQALLTAPALGLPDLTKPFELFVDEKQGYAKGVLTQKLGPWRRPVAYLSKKLDPVAAGWPPCLRMVAAIAVLTKDVGKLTMGQPLVILAPHAVEALVKQPPDRWLSNARMTHYQALLLDTDRVQFGPIVALNPATLLPLPEEGLQHDCLDILAEAHGTRPDLTDQPLPDADHTWYTDGSSFLQEGQRRAGAAVTTETEVIWAKALPAGTSAQRAELIALTQALKMAAGKKLNVYTDSRYAFATAHIHGEIYRRRGWLTSEGKEIKNKDEILALLKALFLPKRLSIIHCPGHQKGNHAEARGNRMADQAAREVATRETPETSTLL

SEQ ID NO: 8068 - protein, 671 aa, synthetic construct
TLNIEDEYRLHETSKGPDVPLGSTWLSDFPQAWAETGGMGLAVRQAPLIIPLKATSTPVSIKQYPMSQEARLGIKPHIQRLLDQGILVPCQSPWNTPLLPVKKPGTNDYRPVQDLREVNKRVEDIHPTVPNPYNLLSGLPPSHQWYTVLDLKDAFFCLRLHPTSQSLFAFEWRDPEMGISGQLTWTRLPQGFKNSPTLFNEALHRDLADFRIQHPDLILLQYVDDLLLAATSELDCQQGTRALLQTLGDLGYRASAKKAQICQKQVKYLGYLLKEGQRWLTEARKETVMGQPTPKTPRQLREFLGTAGFCRLWIPGFAEMAAPLYPLTKPGTLFEWGPDQQKAYQEIKQALLTAPALGLPDLTKPFELFVDEKQGYAKGVLTQKLGPWRRPVAYLSKKLDPVAAGWPPCLRMVAAIAVLTKDAGKLTMGQPLVILAPHAVEALVKQPPDRWLSNARMTHYQALLLDTDRVQFGPIVALNPATLLPLPEEGLQHDCLDILAEAHGTRPDLTDQPLPDADHTWYTDGSSFLQEGQRKAGAAVTTETEVVWAKALPAGTSAQRAELIALTQALKMAEGKKLNVYTDSRYAFATAHIHGEIYRRRGWLTSEGKEIKNKDEILALLKALFLPKRLSIIHCPGHQKGNRAEARGNRMADQAAREVATRETPETSTLL

SEQ ID NO: 8069 - protein, 671 aa, synthetic construct
TLNIEDEYRLHETSKGPDVPLGSTWLSDFPQAWAETGGMGLAVRQAPLIIPLKATSTPVSIKQYPMSQEARLGIKPHIQRLLDQGILVPCQSPWNTPLLPVKKPGTNDYRPVQDLREVNKRVEDIHPTVPNPYNLLSGLPPSHQWYTVLDLKDAFFCLRLHPTSQSLFAFEWRDPEMGISGQLTWTRLPQGFKNSPTLFNEALHRDLADFRIQHPDLILLQYVDDLLLAATSELDCQQGTRALLQTLGDLGYRASAKKAQICQKQVKYLGYLLKEGQRWLTEARKETVMGQPTPKTPRQLREFLGKAGFCRLFIPGFAEMAAPLYPLTKPGTLFEWGPDQQKAYQEIKQALLTAPALGLPDLTKPFELFVDEKQGYAKGVLTQKLGPWRRPVAYLSKKLDPVAAGWPPCLRMVAAIAVLTKDAGKLTMGQPLVILAPHAVEALVKQPPDRWLSNARMTHYQALLLDTDRVQFGPIVALNPATLLPLPEEGLQHDCLDILAEAHGTRPDLTDQPLPDADHTWYTDGSSFLQEGQRKAGAAVTTETEVVWAKALPAGTSAQRAELIALTQALKMAEGKKLNVYTDSRYAFATAHIHGEIYRRRGWLTSEGKEIKNKDEILALLKALFLPKRLSIIHCPGHQKGNRAEARGNRMADQAAREVATRETPETSTLL

SEQ ID NO: 8070 - protein, 671 aa, Murine leukemia virus; identical to SEQ ID NO: 5003

SEQ ID NO: 8071 - protein, 671 aa, Murine leukemia virus; identical to SEQ ID NO: 5003

SEQ ID NO: 8072 - protein, 671 aa, synthetic construct
TLNIEDEHRLHETSKEPDVSLGSTWLSDFPQAWAETGGMGLAVRQAPLIIPLKATSTPVSIKQYPMSQEARLGIKPHIQRLLDQGILVPCQSPWNTPLLPVKKPGTNDYRPVQDLREVNKRVEDIHPTVPNPYNLLSGLPPSHQWYTVLDLKDAFFCLRLHPTSQPLFAFEWRDPEMGISGQLTWTRLPQGFKNSPTLFNEALHRDLADFRIQHPDLILLQYVDDLLLAATSELDCQQGTRALLQTLGNLGYRASAKKAQICQKQVKYLGYLLKEGQRWLTEARKETVMGQPTPKTPRQLREFLGTAGFCRLWIPGFAEMAAPLYPLTKPGTLFNWGPDQQKAYQEIKQALLTAPALGLPDLTKPFELFVDEKQGYAKGVLTQKLGPWRRPVAYLSKKLDPVAAGWPPCLRMVAAIAVLTKDAGKLTMGQPLVILAPHAVEALVKQPPDRWLSNARMTHYQALLLDTDRVQFGPVVALNPATLLPLPEEGLQHNCLDILAEAHGTRPDLTDQPLPDADHTWYTDGSSLLQEGQRKAGAAVTTETEVIWAKALPAGTSAQRAELIALTQALKMAEGKKLNVYTDSRYAFATAHIHGEIYRRRGWLTSEGKEIKNKDEILALLKALFLPKRLSIIHCPGHQKGHSAEARGNRMADQAARKAAITETPDTSTLL

SEQ ID NO: 8073 - protein, 671 aa, synthetic construct; identical to SEQ ID NO: 8072

SEQ ID NO: 8074 - protein, 671 aa, synthetic construct
TLNIEDEHRLHETSKEPDVSLGSTWLSDFPQAWAETGGMGLAVRQAPLIIPLKATSTPVSIKQYPMSQEARLGIKPHIQRLLDQGILVPCQSPWNTPLLPVKKPGTNDYRPVQDLREVNKRVEDIHPTVPNPYNLLSGLPPSHQWYTVLDLKDAFFCLRLHPTSQPLFAFEWRDPEMGISGQLTWTRLPQGFKNSPTLFNEALHRDLADFRIQHPDLILLQYVDDLLLAATSELDCQQGTRALLQTLGNLGYRASAKKAQICQKQVKYLGYLLKEGQRWLTEARKETVMGQPTPKTPRQLREFLGKAGFCRLFIPGFAEMAAPLYPLTKPGTLFNWGPDQQKAYQEIKQALLTAPALGLPDLTKPFELFVDEKQGYAKGVLTQKLGPWRRPVAYLSKKLDPVAAGWPPCLRMVAAIAVLTKDAGKLTMGQPLVILAPHAVEALVKQPPDRWLSNARMTHYQALLLDTDRVQFGPVVALNPATLLPLPEEGLQHNCLDILAEAHGTRPDLTDQPLPDADHTWYTDGSSLLQEGQRKAGAAVTTETEVIWAKALPAGTSAQRAELIALTQALKMAEGKKLNVYTDSRYAFATAHIHGEIYRRRGWLTSEGKEIKNKDEILALLKALFLPKRLSIIHCPGHQKGHSAEARGNRMADQAARKAAITETPDTSTLL

SEQ ID NO: 8075 - protein, 671 aa, synthetic construct; identical to SEQ ID NO: 8074

SEQ ID NO: 8076 - protein, 691 aa, synthetic construct
TLNIEDEYRLHETSKEPDVSLGSTWLSDFPQAWAETGGMGLAVRQAPLIIPLKATSTPVSIKQYPMSQEARLGIKPHIQRLLDQGILVPCQSPWNTPLLPVKKPGTNDYRPVQDLREVNKRVEDIHPTVPNPYNLLSGLPPSHQWYTVLDLKDAFFCLRLHPTSQPLFAFEWRDPEMGISGQLTWTRLPQGFKNSPTLFNEALHRDLADFRIQHPDLILLQYVDDLLLAATSELDCQQGTRALLQTLGNLGYRASAKKAQICQKQVKYLGYLLKEGQRWLTEARKETVMGQPTPKTPRQLREFLGKAGFCRLFIPGFAEMAAPLYPLTKPGTLFNWGPDQQKAYQEIKQALLTAPALGLPDLTKPFELFVDEKQGYAKGVLTQKLGPWRRPVAYLSKKLDPVAAGWPPCLRMVAAIAVLTKDAGKLTMGQPLVILAPHAVEALVKQPPDRWLSNARMTHYQALLLDTDRVQFGPVVALNPATLLPLPEEGLQHNCLDILAEAHGTRPDLTDQPLPDADHTWYTDGSSLLQEGQRKAGAAVTTETEVIWAKALPAGTSAQRAELIALTQALKMAEGKKLNVYTDSRYAFATAHIHGEIYRRRGWLTSEGKEIKNKDEILALLKALFLPKRLSIIHCPGHQKGHSAEARGNRMADQAARKAAITETPDTSTLLIENSSPSGGSKRTADGSEFE

SEQ ID NO: 8077 - protein, 691 aa, synthetic construct; identical to SEQ ID NO: 8076

SEQ ID NO: 8078 - protein, 671 aa, unidentified
TLNIEDEYRLHEISTEPDVSPGSTWLSDFPQAWAETGGMGLAVRQAPLIIPLKATSTPVSIKQYPMSQEAKLGIKPHIQRLLDQGILVPCQSPWNTPLLPVKKPGTNDYRPVQGLREVNKRVEDIHPTVPNPYNLLSGLPTSHRWYTVLDLKDAFFCLRLHPTSQPLFASEWRDPGMGISGQLTWTRLPQGFKNSPTLFDEALHRGLADFRIQHPDLILLQYVDDLLLAATSELDCQQGTRALLKTLGNLGYRASAKKAQICQKQVKYLGYLLREGQRWLTEARKETVMGQPTPKTPRQLREFLGTAGFCRLWIPRFAEMAAPLYPLTKTGTLFNWGPDQQKAYHEIKQALLTAPALGLPDLTKPFELFVDEKQGYAKGVLTQKLGPWRRPVAYLSKKLDPVAAGWPPCLRMVAAIAVLTKDAGKLTMGQPLVILAPHAVEALVKQPPDRWLSNARMTHYQAMLLDTDRVQFGPVVALNPATLLPLPEEGAPHDCLEILAETHGTEPDLTDQPIPDADHTWYTDGSSFLQEGQRKAGAAVTTETEVIWARALPAGTSAQRAELIALTQALKMAEGKRLNVYTDSRYAFATAHIHGEIYKRRGLLTSEGREIKNKSEILALLKALFLPKRLSIIHCLGHQKGDSAEARGNRLADQAAREAAIKTPPDTSTLL

SEQ ID NO: 8079 - protein, 671 aa, synthetic construct
TLNIEDEYRLHEISTEPDVSPGSTWLSDFPQAWAETGGMGLAVRQAPLIIPLKATSTPVSIKQYPMSQEAKLGIKPHIQRLLDQGILVPCQSPWNTPLLPVKKPGTNDYRPVQGLREVNKRVEDIHPTVPNPYNLLSGLPTSHRWYTVLDLKDAFFCLRLHPTSQPLFASEWRDPGMGISGQLTWTRLPQGFKNSPTLFNEALHRGLADFRIQHPDLILLQYVDDLLLAATSELDCQQGTRALLKTLGNLGYRASAKKAQICQKQVKYLGYLLREGQRWLTEARKETVMGQPTPKTPRQLREFLGTAGFCRLWIPRFAEMAAPLYPLTKPGTLFNWGPDQQKAYHEIKQALLTAPALGLPDLTKPFELFVDEKQGYAKGVLTQKLGPWRRPVAYLSKKLDPVAAGWPPCLRMVAAIAVLTKDAGKLTMGQPLVILAPHAVEALVKQPPDRWLSNARMTHYQAMLLDTDRVQFGPVVALNPATLLPLPEEGAPHDCLEILAETHGTEPDLTDQPIPDADHTWYTDGSSFLQEGQRKAGAAVTTETEVIWARALPAGTSAQRAELIALTQALKMAEGKRLNVYTDSRYAFATAHIHGEIYKRRGWLTSEGREIKNKSEILALLKALFLPKRLSIIHCLGHQKGDSAEARGNRLADQAAREAAIKTPPDTSTLL

SEQ ID NO: 8080 - protein, 691 aa, Mouse mammary tumor virus
WVQEISDSRPMLHIYLNGRRFLGLLNTGADKTCIAGRDWPANWPIHQTESSLQGLGMACGVARSSQPLRWQHEDKSGIIHPFVIPTLPFTLWGRDIMKDIKVRLMTDSPDDSQDLMIGAIESNLFADQISWKSDQPVWLNQWPLKQEKLQALQQLVTEQLQLGHLEESNSPWNTPVFVIKKKSGKWRLLQDLRAVNATMHDMGALQPGLPSPVAVPKGWEIIIIDLQDCFFNIKLHPEDCKRFAFSVPSPNFKRPYQRFQWKVLPQGMKNSPTLCQKFVDKAILTVRDKYQDSYIVHYMDDILLAHPSRSIVDEILTSMIQALNKHGLVVSTEKIQKYDNLKYLGTHIQGDSVSYQKLQIRTDKLRTLNDFQKLLGNINWIRPFLKLTTGELKPLFEILNGDSNPISTRKLTPEACKALQLMNERLSTARVKRLDLSQPWSLCILKTEYTPTACLWQDGVVEWIHLPHISPKVITPYDIFCTQLIIKGRHRSKELFSKDPDYIVVPYTKVQFDLLLQEKEDWPISLLGFLGEVHFHLPKDPLLTFTLQTAIIFPHMTSTTPLEKGIVIFTDGSANGRSVTYIQGREPIIKENTQNTAQQAEIVAVITAFEEVSQPFNLYTDSKYVTGLFPEIETATLSPRTKIYTELKHLQRLIHKRQEKFYIGHIRGHTGLPGPLAQGNAYADSLTRILT

SEQ ID NO: 8081 - protein, 691 aa, Mouse mammary tumor virus; identical to SEQ ID NO: 8080

SEQ ID NO: 8082 - protein, 691 aa, synthetic construct
WVQEISDSRPMLHIYLNGRRFLGLLNTGADKTCIAGRDWPANWPIHQTESSLQGLGMACGVARSSQPLRWQHEDKSGIIHPFVIPTLPFTLWGRDIMKDIKVRLMTDSPDDSQDLMIGAIESNLFADQISWKSDQPVWLNQWPLKQEKLQALQQLVTEQLQLGHLEESNSPWNTPVFVIKKKSGKWRLLQDLRAVNATMHDMGALQPGLPSPVAVPKGWEIIIIDLQDCFFNIKLHPEDCKRFAFSVPSPNFKRPYQRFQWKVLPQGMKNSPTLCQKFVDKAILTVRDKYQDSYIVHYMDDILLAHPSRSIVDEILTSMIQALNKHGLVVSTEKIQKYDNLKYLGTHIQGDSVSYQKLQIRTDKLRTLNDFQKLLGNINWIRPFLKLTTGELKPLFEILNPDSNPISTRKLTPEACKALQLMNERLSTARVKRLDLSQPWSLCILKTEYTPTACLWQDGVVEWIHLPHISPKVITPYDIFCTQLIIKGRHRSKELFSKDPDYIVVPYTKVQFDLLLQEKEDWPISLLGFLGEVHFHLPKDPLLTFTLQTAIIFPHMTSTTPLEKGIVIFTDGSANGRSVTYIQGREPIIKENTQNTAQQAEIVAVITAFEEVSQPFNLYTDSKYVTGLFPEIETATLSPRTKIYTELKHLQRLIHKRQEKFYIGHIRGHTGLPGPLAQGNAYADSLTRILT

SEQ ID NO: 8083 - protein, 691 aa, synthetic construct
VQEISDSRPMLHIYLNGRRFLGLLDTGADKTCIAGRDWPANWPIHQTESSLQGLGMACGVARSSQPLRWQHEDKSGIIHPFVIPTLPFTLWGRDIMKDIKVRLMTDSPDDSQDLMIGAIESNLFADQISWKSDQPVWLNQWPLKQEKLQALQQLVTEQLQLGHLEESNSPWNTPVFVIKKKSGKWRLLQDLRAVNATMHDMGALQPGLPSPVAVPKGWEIIIIDLQDCFFNIKLHPEDCKRFAFSVPSPNFKRPYQRFQWKVLPQGMKNSPTLCQKFVDKAILTVRDKYQDSYIVHYMDDILLAHPSRSIVDEILTSMIQALNKHGLVVSTEKIQKYDNLKYLGTHIQGDSVSYQKLQIRTDKLRTLNDFQKLLGNINWIRPFLKLTTGELKPLFEILNPDSNPISTRKLTPEACKALQLMNERLSTARVKRLDLSQPWSLCILKTEYTPTACLWQDGVVEWIHLPHISPKVITPYDIFCTQLIIKGRHRSKELFSKDPDYIVVPYTKVQFDLLLQEKEDWPISLLGFLGEVHFHLPKDPLLTFTLQTAIIFPHMTSTTPLEKGIVIFTDGSANGRSVTYIQGREPIIKENTQNTAQQAEIVAVITAFEEVSQPFNLYTDSKYVTGLFPEIETATLSPRTKIYTELKHLQRLIHKRQEKFYIGHIRGHTGLPGPLAQGNAYADSLTRILTA

SEQ ID NO: 8084 - protein, 691 aa, synthetic construct; identical to SEQ ID NO: 8083

SEQ ID NO: 8085 - protein, 691 aa, synthetic construct
WVQEISDSRPMLHIYLNGRRFLGLLNTGADKTCIAGRDWPANWPIHQTESSLQGLGMACGVARSSQPLRWQHEDKSGIIHPFVIPTLPFTLWGRDIMKDIKVRLMTDSPDDSQDLMIGAIESNLFADQISWKSDQPVWLNQWPLKQEKLQALQQLVTEQLQLGHLEESNSPWNTPVFVIKKKSGKWRLLQDLRAVNATMHDMGALQPGLPSPVAPPKGWEIIIIDLQDCFFNIKLHPEDCKRFAFSVPSPNFKRPYQRFQWKVLPQGMKNSPTLCQKFVDKAILTVRDKYQDSYIVHYMDDILLAHPSRSIVDEILTSMIQALNKHGLVVSTEKIQKYDNLKYLGTHIQGDSVSYQKLQIRTDKLRTLNDFQKLLGNINWIRPFLKLTTGELKPLFEILNPDSNPISTRKLTPEACKALQLMNERLSTARVKRLDLSQPWSLCILKTEYTPTACLWQDGVVEWIHLPHISPKVITPYDIFCTQLIIKGRHRSKELFSKDPDYIVVPYTKVQFDLLLQEKEDWPISLLGFLGEVHFHLPKDPLLTFTLQTAIIFPHMTSTTPLEKGIVIFTDGSANGRSVTYIQGREPIIKENTQNTAQQAEIVAVITAFEEVSQPFNLYTDSKYVTGLFPEIETATLSPRTKIYTELKHLQRLIHKRQEKFYIGHIRGHTGLPGPLAQGNAYADSLTRILT

SEQ ID NO: 8086 - protein, 691 aa, synthetic construct; identical to SEQ ID NO: 8085

SEQ ID NO: 8087 - protein, 691 aa, synthetic construct
VQEISDSRPMLHIYLNGRRFLGLLDTGADKTCIAGRDWPANWPIHQTESSLQGLGMACGVARSSQPLRWQHEDKSGIIHPFVIPTLPFTLWGRDIMKDIKVRLMTDSPDDSQDLMIGAIESNLFADQISWKSDQPVWLNQWPLKQEKLQALQQLVTEQLQLGHLEESNSPWNTPVFVIKKKSGKWRLLQDLRAVNATMHDMGALQPGLPSPPAVPKGWEIIIIDLQDCFFNIKLHPEDCKRFAFSVPSPNFKRPYQRFQWKVLPQGMKNSPTLCQKFVDKAILTVRDKYQDSYIVHYMDDILLAHPSRSIVDEILTSMIQALNKHGLVVSTEKIQKYDNLKYLGTHIQGDSVSYQKLQIRTDKLRTLNDFQKLLGNINWIRPFLKLTTGELKPLFEILNPDSNPISTRKLTPEACKALQLMNERLSTARVKRLDLSQPWSLCILKTEYTPTACLWQDGVVEWIHLPHISPKVITPYDIFCTQLIIKGRHRSKELFSKDPDYIVVPYTKVQFDLLLQEKEDWPISLLGFLGEVHFHLPKDPLLTFTLQTAIIFPHMTSTTPLEKGIVIFTDGSANGRSVTYIQGREPIIKENTQNTAQQAEIVAVITAFEEVSQPFNLYTDSKYVTGLFPEIETATLSPRTKIYTELKHLQRLIHKRQEKFYIGHIRGHTGLPGPLAQGNAYADSLTRILTA

SEQ ID NO: 8088 - protein, 691 aa, synthetic construct; identical to SEQ ID NO: 8087

SEQ ID NO: 8089 - protein, 691 aa, Mouse mammary tumor virus
VQEISDSRPMLHIYLNGRRFLGLLDTGADKTCIAGRDWPANWPIHQTESSLQGLGMACGVARSSQPLRWQHEDKSGIIHPFVIPTLPFTLWGRDIMKDIKVRLMTDSPDDSQDLMIGAIESNLFADQISWKSDQPVWLNQWPLKQEKLQALQQLVTEQLQLGHLEESNSPWNTPVFVIKKKSGKWRLLQDLRAVNATMHDMGALQPGLPSPVAVPKGWEIIIIDLQDCFFNIKLHPEDCKRFAFSVPSPNFKRPYQRFQWKVLPQGMKNSPTLCQKFVDKAILTVRDKYQDSYIVHYMDDILLAHPSRSIVDEILTSMIQALNKHGLVVSTEKIQKYDNLKYLGTHIQGDSVSYQKLQIRTDKLRTLNDFQKLLGNINWIRPFLKLTTGELKPLFEILNGDSNPISTRKLTPEACKALQLMNERLSTARVKRLDLSQPWSLCILKTEYTPTACLWQDGVVEWIHLPHISPKVITPYDIFCTQLIIKGRHRSKELFSKDPDYIVVPYTKVQFDLLLQEKEDWPISLLGFLGEVHFHLPKDPLLTFTLQTAIIFPHMTSTTPLEKGIVIFTDGSANGRSVTYIQGREPIIKENTQNTAQQAEIVAVITAFEEVSQPFNLYTDSKYVTGLFPEIETATLSPRTKIYTELKHLQRLIHKRQEKFYIGHIRGHTGLPGPLAQGNAYADSLTRILTA

SEQ ID NO: 8090 - protein, 691 aa, Mouse mammary tumor virus; identical to SEQ ID NO: 8089

SEQ ID NO: 8091 - protein, 599 aa, Mouse mammary tumor virus
GRDIMKDIKVRLMTDSPDDSQDLMIGAIESNLFADQISWKSDQPVWLNQWPLKQEKLQALQQLVTEQLQLGHLEESNSPWNTPVFVIKKKSGKWRLLQDLRAVNATMHDMGALQPGLPSPVAVPKGWEIIIIDLQDCFFNIKLHPEDCKRFAFSVPSPNFKRPYQRFQWKVLPQGMKNSPTLCQKFVDKAILTVRDKYQDSYIVHYMDDILLAHPSRSIVDEILTSMIQALNKHGLVVSTEKIQKYDNLKYLGTHIQGDSVSYQKLQIRTDKLRTLNDFQKLLGNINWIRPFLKLTTGELKPLFEILNGDSNPISTRKLTPEACKALQLMNERLSTARVKRLDLSQPWSLCILKTEYTPTACLWQDGVVEWIHLPHISPKVITPYDIFCTQLIIKGRHRSKELFSKDPDYIVVPYTKVQFDLLLQEKEDWPISLLGFLGEVHFHLPKDPLLTFTLQTAIIFPHMTSTTPLEKGIVIFTDGSANGRSVTYIQGREPIIKENTQNTAQQAEIVAVITAFEEVSQPFNLYTDSKYVTGLFPEIETATLSPRTKIYTELKHLQRLIHKRQEKFYIGHIRGHTGLPGPLAQGNAYADSLTRILT

SEQ ID NO: 8092 - protein, 599 aa, Mouse mammary tumor virus; identical to SEQ ID NO: 8091

SEQ ID NO: 8093 - protein, 599 aa, synthetic construct
GRDIMKDIKVRLMTDSPDDSQDLMIGAIESNLFADQISWKSDQPVWLNQWPLKQEKLQALQQLVTEQLQLGHLEESNSPWNTPVFVIKKKSGKWRLLQDLRAVNATMHDMGALQPGLPSPVAVPKGWEIIIIDLQDCFFNIKLHPEDCKRFAFSVPSPNFKRPYQRFQWKVLPQGMKNSPTLCQKFVDKAILTVRDKYQDSYIVHYMDDILLAHPSRSIVDEILTSMIQALNKHGLVVSTEKIQKYDNLKYLGTHIQGDSVSYQKLQIRTDKLRTLNDFQKLLGNINWIRPFLKLTTGELKPLFEILNPDSNPISTRKLTPEACKALQLMNERLSTARVKRLDLSQPWSLCILKTEYTPTACLWQDGVVEWIHLPHISPKVITPYDIFCTQLIIKGRHRSKELFSKDPDYIVVPYTKVQFDLLLQEKEDWPISLLGFLGEVHFHLPKDPLLTFTLQTAIIFPHMTSTTPLEKGIVIFTDGSANGRSVTYIQGREPIIKENTQNTAQQAEIVAVITAFEEVSQPFNLYTDSKYVTGLFPEIETATLSPRTKIYTELKHLQRLIHKRQEKFYIGHIRGHTGLPGPLAQGNAYADSLTRILT

SEQ ID NO: 8094 - protein, 599 aa, synthetic construct; identical to SEQ ID NO: 8093

SEQ ID NO: 8095 - protein, 599 aa, synthetic construct
GRDIMKDIKVRLMTDSPDDSQDLMIGAIESNLFADQISWKSDQPVWLNQWPLKQEKLQALQQLVTEQLQLGHLEESNSPWNTPVFVIKKKSGKWRLLQDLRAVNATMHDMGALQPGLPSPVAPPKGWEIIIIDLQDCFFNIKLHPEDCKRFAFSVPSPNFKRPYQRFQWKVLPQGMKNSPTLCQKFVDKAILTVRDKYQDSYIVHYMDDILLAHPSRSIVDEILTSMIQALNKHGLVVSTEKIQKYDNLKYLGTHIQGDSVSYQKLQIRTDKLRTLNDFQKLLGNINWIRPFLKLTTGELKPLFEILNPDSNPISTRKLTPEACKALQLMNERLSTARVKRLDLSQPWSLCILKTEYTPTACLWQDGVVEWIHLPHISPKVITPYDIFCTQLIIKGRHRSKELFSKDPDYIVVPYTKVQFDLLLQEKEDWPISLLGFLGEVHFHLPKDPLLTFTLQTAIIFPHMTSTTPLEKGIVIFTDGSANGRSVTYIQGREPIIKENTQNTAQQAEIVAVITAFEEVSQPFNLYTDSKYVTGLFPEIETATLSPRTKIYTELKHLQRLIHKRQEKFYIGHIRGHTGLPGPLAQGNAYADSLTRILT

SEQ ID NO: 8096 - protein, 599 aa, synthetic construct; identical to SEQ ID NO: 8095

SEQ ID NO: 8097 - protein, 585 aa, Mason-Pfizer monkey virus
LTAAIDILAPQQCAEPITWKSDEPVWVDQWPLTNDKLAAAQQLVQEQLEAGHITESSSPWNTPIFVIKKKSGKWRLLQDLRAVNATMVLMGALQPGLPSPVAIPQGYLKIIIDLKDCFFSIPLHPSDQKRFAFSLPSTNFKEPMQRFQWKVLPQGMANSPTLCQKYVATAIHKVRHAWKQMYIIHYMDDILIAGKDGQQVLQCFDQLKQELTAAGLHIAPEKVQLQDPYTYLGFELNGPKITNQKAVIRKDKLQTLNDFQKLLGDINWLRPYLKLTTGDLKPLFDTLKGDSDPNSHRSLSKEALASLEKVETAIAEQFVTHINYSLPLIFLIFNTALTPTGLFWQDNPIMWIHLPASPKKVLLPYYDAIADLIILGRDHSKKYFGIEPSTIIQPYSKSQIDWLMQNTEMWPIACASFVGILDNHYPPNKLIQFCKLHTFVFPQIISKTPLNNALLVFTDGSSTGMAAYTLTDTTIKFQTNLNSAQLVELQALIAVLSAFPNQPLNIYTDSAYLAHSIPLLETVAQIKHISETAKLFLQCQQLIYNRSIPFYIGHVRAHSGLPGPIAQGNQRADLATKIVASNINT

SEQ ID NO: 8098 - protein, 585 aa, synthetic construct
LTAAIDILAPQQCAEPITWKSDEPVWVDQWPLTNDKLAAAQQLVQEQLEAGHITESSSPWNTPIFVIKKKSGKWRLLQDLRAVNATMVLMGALQPGLPSPVAPPQGYLKIIIDLKDCFFSIPLHPSDQKRFAFSLPSTNFKEPMQRFQWKVLPQGMANSPTLCQKYVATAIHKVRHAWKQMYIIHYMDDILIAGKDGQQVLQCFDQLKQELTAAGLHIAPEKVQLQDPYTYLGFELNGPKITNQKAVIRKDKLQTLNDFQKLLGDINWLRPYLKLTTGDLKPLFDTLKPDSDPNSHRSLSKEALASLEKVETAIAEQFVTHINYSLPLIFLIFNTALTPTGLFWQDNPIMWIHLPASPKKVLLPYYDAIADLIILGRDHSKKYFGIEPSTIIQPYSKSQIDWLMQNTEMWPIACASFVGILDNHYPPNKLIQFCKLHTFVFPQIISKTPLNNALLVFTDGSSTGMAAYTLTDTTIKFQTNLNSAQLVELQALIAVLSAFPNQPLNIYTDSAYLAHSIPLLETVAQIKHISETAKLFLQCQQLIYNRSIPFYIGHVRAHSGLPGPIAQGNQRADLATKIVASNINT

SEQ ID NO: 8099 - protein, 665 aa, unidentified
TLQLDDEYRLYSPLVKPDQNIQFWLEQFPQAWAETAGMGLAKQVPPQVIQLKASATPVSVRQYPLSKEAQEGIRPHVQRLIQQGILVPVQSPWNTPLLPVRKPGTNDYRPVQDLREVNKRVQDIHPTVPNPYNLLCALPPQRSWYTVLDLKDAFFCLRLHPTSQPLFAFEWRDPGTGRTGQLTWTRLPQGFKNSPTIFDEALHRDLANFRIQHPQVTLLQYVDDLLLAGATKQDCLEGTKALLLELSDLGYRASAKKAQICRREVTYLGYSLRDGQRWLTEARKKTVVQIPAPTTAKQVREFLGTAGFCRLWIPGFATLAAPLYPLTKEKGEFSWAPEHQKAFDAIKKALLSAPALALPDVTKPFTLYVDERKGVARGVLTQTLGPWRRPVAYLSKKLDPVASGWPVCLKAIAAVAILVKDADKLTLGQNITVIAPHALENIVRQPPDRWMTNARMTHYQSLLLTERVTFAPPAALNPATLLPEETDEPVTHDCHQLLIEETGVRKDLTDIPLTGEVLTWFTDGSSYVVEGKRMAGAAVVDGTRTIWASSLPEGTSAQKAELMALTQALRLAEGKSINIYTDSRYAFATAHVHGAIYKQRGLLTSAGREIKNKEEILSLLEALHLPKRLAIIHCPGHQKAKDPISRGNQMADRVAKQAAQGVNLL

SEQ ID NO: 8100 - protein, 665 aa, unidentified; identical to SEQ ID NO: 8099

SEQ ID NO: 8101 - protein, 665 aa, synthetic construct
TLQLDDEYRLYSPLVKPDQNIQFWLEQFPQAWAETAGMGLAKQVPPQVIQLKASATPVSVRQYPLSKEAQEGIRPHVQRLIQQGILVPVQSPWNTPLLPVRKPGTNDYRPVQDLREVNKRVQDIHPTVPNPYNLLCALPPQRSWYTVLDLKDAFFCLRLHPTSQPLFAFEWRDPGTGRTGQLTWTRLPQGFKNSPTIFNEALHRDLANFRIQHPQVTLLQYVDDLLLAGATKQDCLEGTKALLLELSDLGYRASAKKAQICRREVTYLGYSLRDGQRWLTEARKKTVVQIPAPTTAKQVREFLGTAGFCRLWIPGFATLAAPLYPLTKPKGEFSWAPEHQKAFDAIKKALLSAPALALPDVTKPFTLYVDERKGVARGVLTQTLGPWRRPVAYLSKKLDPVASGWPVCLKAIAAVAILVKDADKLTLGQNITVIAPHALENIVRQPPDRWMTNARMTHYQSLLLTERVTFAPPAALNPATLLPEETDEPVTHDCHQLLIEETGVRKDLTDIPLTGEVLTWFTDGSSYVVEGKRMAGAAVVDGTRTIWASSLPEGTSAQKAELMALTQALRLAEGKSINIYTDSRYAFATAHVHGAIYKQRGWLTSAGREIKNKEEILSLLEALHLPKRLAIIHCPGHQKAKDPISRGNQMADRVAKQAAQGVNLL

SEQ ID NO: 8102 - protein, 665 aa, synthetic construct; identical to SEQ ID NO: 8101

SEQ ID NO: 8103 - protein, 663 aa, synthetic construct
LDDEYRLYSPLVKPDQNIQFWLEQFPQAWAETAGMGLAKQVPPQVIQLKASATPVSVRQYPLSKEAQEGIRPHVQRLIQQGILVPVQSPWNTPLLPVRKPGTNDYRPVQDLREVNKRVQDIHPTVPNPYNLLCALPPQRSWYTVLDLKDAFFCLRLHPTSQPLFAFEWRDPGTGRTGQLTWTRLPQGFKNSPTIFNEALHRDLANFRIQHPQVTLLQYVDDLLLAGATKQDCLEGTKALLLELSDLGYRASAKKAQICRREVTYLGYSLRDGQRWLTEARKKTVVQIPAPTTAKQVREFLGKAGFCRLFIPGFATLAAPLYPLTKPKGEFSWAPEHQKAFDAIKKALLSAPALALPDVTKPFTLYVDERKGVARGVLTQTLGPWRRPVAYLSKKLDPVASGWPVCLKAIAAVAILVKDADKLTLGQNITVIAPHALENIVRQPPDRWMTNARMTHYQSLLLTERVTFAPPAALNPATLLPEETDEPVTHDCHQLLIEETGVRKDLTDIPLTGEVLTWFTDGSSYVVEGKRMAGAAVVDGTRTIWASSLPEGTSAQKAELMALTQALRLAEGKSINIYTDSRYAFATAHVHGAIYKQRGWLTSAGREIKNKEEILSLLEALHLPKRLAIIHCPGHQKAKDPISRGNQMADRVAKQAAQGVNLLP

SEQ ID NO: 8104 - protein, 663 aa, synthetic construct; identical to SEQ ID NO: 8103

SEQ ID NO: 8105 - protein, 751 aa, synthetic construct
MDPLQLLQPLEAEIKGTKLKAHWNSGATITCVPEAFLEDERPIQTMLIKTIHGEKQQDVYYLTFKVQGRKVEAEVLASPYDYILLNPSDVPWLMKKPLQLTVLVPLHEYQERLLQQTALPKEQKELLQKLFLKYDALWQHWENQVGHRRIKPHNIATGTLAPRPQKQYPINPKAKPSIQIVIDDLLKQGVLIQQNSTMNTPVYPVPKPDGKWRMVLDYREVNKTIPLIAAQNQHSAGILSSIYRGKYKTTLDLTNGFWAHPITPESYWLTAFTWQGKQYCWTRLPQGFLNSPALFTADVVDLLKEIPNVQAYVDDIYISHDDPQEHLEQLEKIFSILLNAGYVVSLKKSEIAQREVEFLGFNITKEGRGLTDTFKQKLLNITPPKDLKQLQSILGLLNFARNFIPNYSELVKPLYTIVANANGKFISWTEDNSNQLQHIISVLNQADNLEERNPETRLIIKVNSSPSAGYIRYYNEGSKRPIMYVNYIFSKAEAKFTQTEKLLTTMHKGLIKAMDLAMGQEILVYSPIVSMTKIQRTPLPERKALPVRWITWMTYLEDPRIQFHYDKSLPELQQIPNVTEDVIAKTKHPSEFAMVFYTDGSAIKHPDVNKSHSAGMGIAQVQFIPEYKIVHQWSIPLGDHTAQLAEIAAVEFACKKALKISGPVLIVTDSFYVAESANKELPYWKSNGFLNNKKKPLRHVSKWKSIAECLQLKPDIIIMHEKGHQQPMTTLHTEGNNLADKLATQGSYVVH

SEQ ID NO: 8106 - protein, 751 aa, synthetic construct
MDPLQLLQPLEAEIKGTKLKAHWNSGATITCVPEAFLEDERPIQTMLIKTIHGEKQQDVYYLTFKVQGRKVEAEVLASPYDYILLNPSDVPWLMKKPLQLTVLVPLHEYQERLLQQTALPKEQKELLQKLFLKYDALWQHWENQVGHRRIKPHNIATGTLAPRPQKQYPINPKAKPSIQIVIDDLLKQGVLIQQNSTMNTPVYPVPKPDGKWRMVLDYREVNKTIPLIAAQNQHSAGILSSIYRGKYKTTLDLTNGFWAHPITPESYWLTAFTWQGKQYCWTRLPQGFLNSPALFNADVVDLLKEIPNVQAYVDDIYISHDDPQEHLEQLEKIFSILLNAGYVVSLKKSEIAQREVEFLGFNITKEGRGLTDTFKQKLLNITPPKDLKQLQSILGLLNFARNFIPNYSELVKPLYTIVAPANGKFISWTEDNSNQLQHIISVLNQADNLEERNPETRLIIKVNSSPSAGYIRYYNEGSKRPIMYVNYIFSKAEAKFTQTEKLLTTMHKGLIKAMDLAMGQEILVYSPIVSMTKIQRTPLPERKALPVRWITWMTYLEDPRIQFHYDKSLPELQQIPNVTEDVIAKTKHPSEFAMVFYTDGSAIKHPDVNKSHSAGMGIAQVQFIPEYKIVHQWSIPLGDHTAQLAEIAAVEFACKKALKISGPVLIVTDSFYVAESANKELPYWKSNGFLNNKKKPLRHVSKWKSIAECLQLKPDIIIMHEKGHQQPMTTLHTEGNNLADKLATQGSYVVH

SEQ ID NO: 8107 - protein, 751 aa, synthetic construct
MDPLQLLQPLEAEIKGTKLKAHWNSGATITCVPEAFLEDERPIQTMLIKTIHGEKQQDVYYLTFKVQGRKVEAEVLASPYDYILLNPSDVPWLMKKPLQLTVLVPLHEYQERLLQQTALPKEQKELLQKLFLKYDALWQHWENQVGHRRIKPHNIATGTLAPRPQKQYPINPKAKPSIQIVIDDLLKQGVLIQQNSTMNTPVYPVPKPDGKWRMVLDYREVNKTIPLIAAQNQHSAGILSSIYRGKYKTTLDLTNGFWAHPITPESYWLTAFTWQGKQYCWTRLPQGFLNSPALFNADVVDLLKEIPNVQAYVDDIYISHDDPQEHLEQLEKIFSILLNAGYVVSLKKSEIAQREVEFLGFNITKEGRGLTDTFKQKLLNITPPKDLKQLQSILGKLNFARNFIPNYSELVKPLYTIVAPANGKFISWTEDNSNQLQHIISVLNQADNLEERNPETRLIIKVNSSPSAGYIRYYNEGSKRPIMYVNYIFSKAEAKFTQTEKLLTTMHKGLIKAMDLAMGQEILVYSPIVSMTKIQRTPLPERKALPVRWITWMTYLEDPRIQFHYDKSLPELQQIPNVTEDVIAKTKHPSEFAMVFYTDGSAIKHPDVNKSHSAGMGIAQVQFIPEYKIVHQWSIPLGDHTAQLAEIAAVEFACKKALKISGPVLIVTDSFYVAESANKELPYWKSNGFLNNKKKPLRHVSKWKSIAECLQLKPDIIIMHEKGHQQPMTTLHTEGNNLADKLATQGSYVVH

SEQ ID NO: 8108 - protein, 662 aa, synthetic construct
VPWLMKKPLQLTVLVPLHEYQERLLQQTALPKEQKELLQKLFLKYDALWQHWENQVGHRRIKPHNIATGTLAPRPQKQYPINPKAKPSIQIVIDDLLKQGVLIQQNSTMNTPVYPVPKPDGKWRMVLDYREVNKTIPLIAAQNQHSAGILSSIYRGKYKTTLDLTNGFWAHPITPESYWLTAFTWQGKQYCWTRLPQGFLNSPALFTADVVDLLKEIPNVQAYVDDIYISHDDPQEHLEQLEKIFSILLNAGYVVSLKKSEIAQREVEFLGFNITKEGRGLTDTFKQKLLNITPPKDLKQLQSILGLLNFARNFIPNYSELVKPLYTIVANANGKFISWTEDNSNQLQHIISVLNQADNLEERNPETRLIIKVNSSPSAGYIRYYNEGSKRPIMYVNYIFSKAEAKFTQTEKLLTTMHKGLIKAMDLAMGQEILVYSPIVSMTKIQRTPLPERKALPVRWITWMTYLEDPRIQFHYDKSLPELQQIPNVTEDVIAKTKHPSEFAMVFYTDGSAIKHPDVNKSHSAGMGIAQVQFIPEYKIVHQWSIPLGDHTAQLAEIAAVEFACKKALKISGPVLIVTDSFYVAESANKELPYWKSNGFLNNKKKPLRHVSKWKSIAECLQLKPDIIIMHEKGHQQPMTTLHTEGNNLADKLATQGSYVVH

SEQ ID NO: 8109 - protein, 662 aa, synthetic construct
VPWLMKKPLQLTVLVPLHEYQERLLQQTALPKEQKELLQKLFLKYDALWQHWENQVGHRRIKPHNIATGTLAPRPQKQYPINPKAKPSIQIVIDDLLKQGVLIQQNSTMNTPVYPVPKPDGKWRMVLDYREVNKTIPLIAAQNQHSAGILSSIYRGKYKTTLDLTNGFWAHPITPESYWLTAFTWQGKQYCWTRLPQGFLNSPALFNADVVDLLKEIPNVQAYVDDIYISHDDPQEHLEQLEKIFSILLNAGYVVSLKKSEIAQREVEFLGFNITKEGRGLTDTFKQKLLNITPPKDLKQLQSILGLLNFARNFIPNYSELVKPLYTIVAPANGKFISWTEDNSNQLQHIISVLNQADNLEERNPETRLIIKVNSSPSAGYIRYYNEGSKRPIMYVNYIFSKAEAKFTQTEKLLTTMHKGLIKAMDLAMGQEILVYSPIVSMTKIQRTPLPERKALPVRWITWMTYLEDPRIQFHYDKSLPELQQIPNVTEDVIAKTKHPSEFAMVFYTDGSAIKHPDVNKSHSAGMGIAQVQFIPEYKIVHQWSIPLGDHTAQLAEIAAVEFACKKALKISGPVLIVTDSFYVAESANKELPYWKSNGFLNNKKKPLRHVSKWKSIAECLQLKPDIIIMHEKGHQQPMTTLHTEGNNLADKLATQGSYVVH

SEQ ID NO: 8110 - protein, 662 aa, synthetic construct
VPWLMKKPLQLTVLVPLHEYQERLLQQTALPKEQKELLQKLFLKYDALWQHWENQVGHRRIKPHNIATGTLAPRPQKQYPINPKAKPSIQIVIDDLLKQGVLIQQNSTMNTPVYPVPKPDGKWRMVLDYREVNKTIPLIAAQNQHSAGILSSIYRGKYKTTLDLTNGFWAHPITPESYWLTAFTWQGKQYCWTRLPQGFLNSPALFNADVVDLLKEIPNVQAYVDDIYISHDDPQEHLEQLEKIFSILLNAGYVVSLKKSEIAQREVEFLGFNITKEGRGLTDTFKQKLLNITPPKDLKQLQSILGKLNFARNFIPNYSELVKPLYTIVAPANGKFISWTEDNSNQLQHIISVLNQADNLEERNPETRLIIKVNSSPSAGYIRYYNEGSKRPIMYVNYIFSKAEAKFTQTEKLLTTMHKGLIKAMDLAMGQEILVYSPIVSMTKIQRTPLPERKALPVRWITWMTYLEDPRIQFHYDKSLPELQQIPNVTEDVIAKTKHPSEFAMVFYTDGSAIKHPDVNKSHSAGMGIAQVQFIPEYKIVHQWSIPLGDHTAQLAEIAAVEFACKKALKISGPVLIVTDSFYVAESANKELPYWKSNGFLNNKKKPLRHVSKWKSIAECLQLKPDIIIMHEKGHQQPMTTLHTEGNNLADKLATQGSYVVH

SEQ ID NO: 8111 - protein, 751 aa, unidentified
MDPLQLLQPLEAEIKGTKLKAHWNSGATITCVPQAFLEEEVPIKNIWIKTIHGEKEQPVYYLTFKIQGRKVEAEVISSPYDYILVSPSDIPWLMKKPLQLTTLVPLQEYEERLLKQTMLTGSYKEKLQSLFLKYDALWQHWENQVGHRRIKPHHIATGTVNPRPQKQYPINPKAKASIQTVINDLLKQGVLIQQNSIMNTPVYPVPKPDGKWRMVLDYREVNKTIPLIAAQNQHSAGILSSIFRGKYKTTLDLSNGFWAHSITPESYWLTAFTWLGQQYCWTRLPQGFLNSPALFTADVVDLLKEVPNVQVYVDDIYISHDDPREHLEQLEKVFSLLLNAGYVVSLKKSEIAQHEVEFLGFNITKEGRGLTETFKQKLLNITPPRDLKQLQSILGLLNFARNFIPNFSELVKPLYNIIATANGKYITWTTDNSQQLQNIISMLNSAENLEERNPEVRLIMKVNTSPSAGYIRFYNEFAKRPIMYLNYVYTKAEVKFTNTEKLLTTIHKGLIKALDLGMGQEILVYSPIVSMTKIQKTPLPERKALPIRWITWMSYLEDPRIQFHYDKTLPELQQVPTVTDDIIAKIKHPSEFSMVFYTDGSAIKHPNVNKSHNAGMGIAQVQFKPEFTVINTWSIPLGDHTAQLAEVAAVEFACKKALKIDGPVLIVTDSFYVAESVNKELPYWQSNGFFNNKKKPLKHVSKWKSIADCIQLKPDIIIIHEKGHQPTASTFHTEGNNLADKLATQGSYVVN

SEQ ID NO: 8112 - protein, 751 aa, synthetic construct
MDPLQLLQPLEAEIKGTKLKAHWNSGATITCVPQAFLEEEVPIKNIWIKTIHGEKEQPVYYLTFKIQGRKVEAEVISSPYDYILVSPSDIPWLMKKPLQLTTLVPLQEYEERLLKQTMLTGSYKEKLQSLFLKYDALWQHWENQVGHRRIKPHHIATGTVNPRPQKQYPINPKAKASIQTVINDLLKQGVLIQQNSIMNTPVYPVPKPDGKWRMVLDYREVNKTIPLIAAQNQHSAGILSSIFRGKYKTTLDLSNGFWAHSITPESYWLTAFTWLGQQYCWTRLPQGFLNSPALFNADVVDLLKEVPNVQVYVDDIYISHDDPREHLEQLEKVFSLLLNAGYVVSLKKSEIAQHEVEFLGFNITKEGRGLTETFKQKLLNITPPRDLKQLQSILGLLNFARNFIPNFSELVKPLYNIIATAPGKYITWTTDNSQQLQNIISMLNSAENLEERNPEVRLIMKVNTSPSAGYIRFYNEFAKRPIMYLNYVYTKAEVKFTNTEKLLTTIHKGLIKALDLGMGQEILVYSPIVSMTKIQKTPLPERKALPIRWITWMSYLEDPRIQFHYDKTLPELQQVPTVTDDIIAKIKHPSEFSMVFYTDGSAIKHPNVNKSHNAGMGIAQVQFKPEFTVINTWSIPLGDHTAQLAEVAAVEFACKKALKIDGPVLIVTDSFYVAESVNKELPYWQSNGFFNNKKKPLKHVSKWKSIADCIQLKPDIIIIHEKGHQPTASTFHTEGNNLADKLATQGSYVVN

SEQ ID NO: 8113 - protein, 751 aa, synthetic construct
MDPLQLLQPLEAEIKGTKLKAHWNSGATITCVPQAFLEEEVPIKNIWIKTIHGEKEQPVYYLTFKIQGRKVEAEVISSPYDYILVSPSDIPWLMKKPLQLTTLVPLQEYEERLLKQTMLTGSYKEKLQSLFLKYDALWQHWENQVGHRRIKPHHIATGTVNPRPQKQYPINPKAKASIQTVINDLLKQGVLIQQNSIMNTPVYPVPKPDGKWRMVLDYREVNKTIPLIAAQNQHSAGILSSIFRGKYKTTLDLSNGFWAHSITPESYWLTAFTWLGQQYCWTRLPQGFLNSPALFNADVVDLLKEVPNVQVYVDDIYISHDDPREHLEQLEKVFSLLLNAGYVVSLKKSEIAQHEVEFLGFNITKEGRGLTETFKQKLLNITPPRDLKQLQSILGKLNFARNFIPNFSELVKPLYNIIATAPGKYITWTTDNSQQLQNIISMLNSAENLEERNPEVRLIMKVNTSPSAGYIRFYNEFAKRPIMYLNYVYTKAEVKFTNTEKLLTTIHKGLIKALDLGMGQEILVYSPIVSMTKIQKTPLPERKALPIRWITWMSYLEDPRIQFHYDKTLPELQQVPTVTDDIIAKIKHPSEFSMVFYTDGSAIKHPNVNKSHNAGMGIAQVQFKPEFTVINTWSIPLGDHTAQLAEVAAVEFACKKALKIDGPVLIVTDSFYVAESVNKELPYWQSNGFFNNKKKPLKHVSKWKSIADCIQLKPDIIIIHEKGHQPTASTFHTEGNNLADKLATQGSYVVN

SEQ ID NO: 8114 - protein, 662 aa, unidentified
IPWLMKKPLQLTTLVPLQEYEERLLKQTMLTGSYKEKLQSLFLKYDALWQHWENQVGHRRIKPHHIATGTVNPRPQKQYPINPKAKASIQTVINDLLKQGVLIQQNSIMNTPVYPVPKPDGKWRMVLDYREVNKTIPLIAAQNQHSAGILSSIFRGKYKTTLDLSNGFWAHSITPESYWLTAFTWLGQQYCWTRLPQGFLNSPALFTADVVDLLKEVPNVQVYVDDIYISHDDPREHLEQLEKVFSLLLNAGYVVSLKKSEIAQHEVEFLGFNITKEGRGLTETFKQKLLNITPPRDLKQLQSILGLLNFARNFIPNFSELVKPLYNIIATANGKYITWTTDNSQQLQNIISMLNSAENLEERNPEVRLIMKVNTSPSAGYIRFYNEFAKRPIMYLNYVYTKAEVKFTNTEKLLTTIHKGLIKALDLGMGQEILVYSPIVSMTKIQKTPLPERKALPIRWITWMSYLEDPRIQFHYDKTLPELQQVPTVTDDIIAKIKHPSEFSMVFYTDGSAIKHPNVNKSHNAGMGIAQVQFKPEFTVINTWSIPLGDHTAQLAEVAAVEFACKKALKIDGPVLIVTDSFYVAESVNKELPYWQSNGFFNNKKKPLKHVSKWKSIADCIQLKPDIIIIHEKGHQPTASTFHTEGNNLADKLATQGSYVVN

SEQ ID NO: 8115 - protein, 662 aa, synthetic construct
IPWLMKKPLQLTTLVPLQEYEERLLKQTMLTGSYKEKLQSLFLKYDALWQHWENQVGHRRIKPHHIATGTVNPRPQKQYPINPKAKASIQTVINDLLKQGVLIQQNSIMNTPVYPVPKPDGKWRMVLDYREVNKTIPLIAAQNQHSAGILSSIFRGKYKTTLDLSNGFWAHSITPESYWLTAFTWLGQQYCWTRLPQGFLNSPALFNADVVDLLKEVPNVQVYVDDIYISHDDPREHLEQLEKVFSLLLNAGYVVSLKKSEIAQHEVEFLGFNITKEGRGLTETFKQKLLNITPPRDLKQLQSILGLLNFARNFIPNFSELVKPLYNIIATAPGKYITWTTDNSQQLQNIISMLNSAENLEERNPEVRLIMKVNTSPSAGYIRFYNEFAKRPIMYLNYVYTKAEVKFTNTEKLLTTIHKGLIKALDLGMGQEILVYSPIVSMTKIQKTPLPERKALPIRWITWMSYLEDPRIQFHYDKTLPELQQVPTVTDDIIAKIKHPSEFSMVFYTDGSAIKHPNVNKSHNAGMGIAQVQFKPEFTVINTWSIPLGDHTAQLAEVAAVEFACKKALKIDGPVLIVTDSFYVAESVNKELPYWQSNGFFNNKKKPLKHVSKWKSIADCIQLKPDIIIIHEKGHQPTASTFHTEGNNLADKLATQGSYVVN

SEQ ID NO: 8116 - protein, 662 aa, synthetic construct
IPWLMKKPLQLTTLVPLQEYEERLLKQTMLTGSYKEKLQSLFLKYDALWQHWENQVGHRRIKPHHIATGTVNPRPQKQYPINPKAKASIQTVINDLLKQGVLIQQNSIMNTPVYPVPKPDGKWRMVLDYREVNKTIPLIAAQNQHSAGILSSIFRGKYKTTLDLSNGFWAHSITPESYWLTAFTWLGQQYCWTRLPQGFLNSPALFNADVVDLLKEVPNVQVYVDDIYISHDDPREHLEQLEKVFSLLLNAGYVVSLKKSEIAQHEVEFLGFNITKEGRGLTETFKQKLLNITPPRDLKQLQSILGKLNFARNFIPNFSELVKPLYNIIATAPGKYITWTTDNSQQLQNIISMLNSAENLEERNPEVRLIMKVNTSPSAGYIRFYNEFAKRPIMYLNYVYTKAEVKFTNTEKLLTTIHKGLIKALDLGMGQEILVYSPIVSMTKIQKTPLPERKALPIRWITWMSYLEDPRIQFHYDKTLPELQQVPTVTDDIIAKIKHPSEFSMVFYTDGSAIKHPNVNKSHNAGMGIAQVQFKPEFTVINTWSIPLGDHTAQLAEVAAVEFACKKALKIDGPVLIVTDSFYVAESVNKELPYWQSNGFFNNKKKPLKHVSKWKSIADCIQLKPDIIIIHEKGHQPTASTFHTEGNNLADKLATQGSYVVN

SEQ ID NO: 8117 - protein, 751 aa, synthetic construct
MNPLQLLQPLPAEVKGTKLLAHWNSGATITCIPESFLEDEQPIKQTLIKTIHGEKQQNVYYLTFKVKGRKVEAEVIASPYEYILLSPTDVPWLTQQPLQLTILVPLQEYQDRILNKTALPEEQKQQLKALFTKYDNLWQHWENQVGHRKIRPHNIATGDYPPRPQKQYPINPKAKPSIQIVIDDLLKQGVLTPQNSTMNTPVYPVPKPDGRWRMVLDYREVNKTIPLTAAQNQHSAGILATIVRQKYKTTLDLANGFWAHPITPDSYWLTAFTWQGKQYCWTRLPQGFLNSPALFTADAVDLLKEVPNVQVYVDDIYLSHDNPHEHIQQLEKVFQILLQAGYVVSLKKSEIGQRTVEFLGFNITKEGRGLTDTFKTKLLNVTPPKDLKQLQSILGLLNFARNFIPNFAELVQTLYNLIASSKGKYIEWTEDNTKQLNKVIEALNTASNLEERLPDQRLVIKVNTSPSAGYVRYYNESGKKPIMYLNYVFSKAELKFSMLEKLLTTMHKALIKAMDLAMGQEILVYSPIVSMTKIQKTPLPERKALPIRWITWMTYLEDPRIQFHYDKTLPELKHIPDVYTSSIPPLKHPSQYEGVFCTDGSAIKSPDPTKSNNAGMGIVHAIYNPEYKILNQWSIPLGHHTAQMAEIAAVEFACKKALKVPGPVLVITDSFYVAESANKELPYWKSNGFVNNKKEPLKHISKWKSIAECLSIKPDITIQHEKGHQPINTSIHTEGNALADKLATQGSYVVN

SEQ ID NO: 8118 - protein, 751 aa, synthetic construct
MNPLQLLQPLPAEVKGTKLLAHWNSGATITCIPESFLEDEQPIKQTLIKTIHGEKQQNVYYLTFKVKGRKVEAEVIASPYEYILLSPTDVPWLTQQPLQLTILVPLQEYQDRILNKTALPEEQKQQLKALFTKYDNLWQHWENQVGHRKIRPHNIATGDYPPRPQKQYPINPKAKPSIQIVIDDLLKQGVLTPQNSTMNTPVYPVPKPDGRWRMVLDYREVNKTIPLTAAQNQHSAGILATIVRQKYKTTLDLANGFWAHPITPDSYWLTAFTWQGKQYCWTRLPQGFLNSPALFNADAVDLLKEVPNVQVYVDDIYLSHDNPHEHIQQLEKVFQILLQAGYVVSLKKSEIGQRTVEFLGFNITKEGRGLTDTFKTKLLNVTPPKDLKQLQSILGLLNFARNFIPNFAELVQTLYNLIASSPGKYIEWTEDNTKQLNKVIEALNTASNLEERLPDQRLVIKVNTSPSAGYVRYYNESGKKPIMYLNYVFSKAELKFSMLEKLLTTMHKALIKAMDLAMGQEILVYSPIVSMTKIQKTPLPERKALPIRWITWMTYLEDPRIQFHYDKTLPELKHIPDVYTSSIPPLKHPSQYEGVFCTDGSAIKSPDPTKSNNAGMGIVHAIYNPEYKILNQWSIPLGHHTAQMAEIAAVEFACKKALKVPGPVLVITDSFYVAESANKELPYWKSNGFVNNKKEPLKHISKWKSIAECLSIKPDITIQHEKGHQPINTSIHTEGNALADKLATQGSYVVN

SEQ ID NO: 8119 - protein, 751 aa, synthetic construct
MNPLQLLQPLPAEVKGTKLLAHWNSGATITCIPESFLEDEQPIKQTLIKTIHGEKQQNVYYLTFKVKGRKVEAEVIASPYEYILLSPTDVPWLTQQPLQLTILVPLQEYQDRILNKTALPEEQKQQLKALFTKYDNLWQHWENQVGHRKIRPHNIATGDYPPRPQKQYPINPKAKPSIQIVIDDLLKQGVLTPQNSTMNTPVYPVPKPDGRWRMVLDYREVNKTIPLTAAQNQHSAGILATIVRQKYKTTLDLANGFWAHPITPDSYWLTAFTWQGKQYCWTRLPQGFLNSPALFNADAVDLLKEVPNVQVYVDDIYLSHDNPHEHIQQLEKVFQILLQAGYVVSLKKSEIGQRTVEFLGFNITKEGRGLTDTFKTKLLNVTPPKDLKQLQSILGKLNFARNFIPNFAELVQTLYNLIASSPGKYIEWTEDNTKQLNKVIEALNTASNLEERLPDQRLVIKVNTSPSAGYVRYYNESGKKPIMYLNYVFSKAELKFSMLEKLLTTMHKALIKAMDLAMGQEILVYSPIVSMTKIQKTPLPERKALPIRWITWMTYLEDPRIQFHYDKTLPELKHIPDVYTSSIPPLKHPSQYEGVFCTDGSAIKSPDPTKSNNAGMGIVHAIYNPEYKILNQWSIPLGHHTAQMAEIAAVEFACKKALKVPGPVLVITDSFYVAESANKELPYWKSNGFVNNKKEPLKHISKWKSIAECLSIKPDITIQHEKGHQPINTSIHTEGNALADKLATQGSYVVN

SEQ ID NO: 8120 - protein, 662 aa, synthetic construct
VPWLTQQPLQLTILVPLQEYQDRILNKTALPEEQKQQLKALFTKYDNLWQHWENQVGHRKIRPHNIATGDYPPRPQKQYPINPKAKPSIQIVIDDLLKQGVLTPQNSTMNTPVYPVPKPDGRWRMVLDYREVNKTIPLTAAQNQHSAGILATIVRQKYKTTLDLANGFWAHPITPDSYWLTAFTWQGKQYCWTRLPQGFLNSPALFTADAVDLLKEVPNVQVYVDDIYLSHDNPHEHIQQLEKVFQILLQAGYVVSLKKSEIGQRTVEFLGFNITKEGRGLTDTFKTKLLNVTPPKDLKQLQSILGLLNFARNFIPNFAELVQTLYNLIASSKGKYIEWTEDNTKQLNKVIEALNTASNLEERLPDQRLVIKVNTSPSAGYVRYYNESGKKPIMYLNYVFSKAELKFSMLEKLLTTMHKALIKAMDLAMGQEILVYSPIVSMTKIQKTPLPERKALPIRWITWMTYLEDPRIQFHYDKTLPELKHIPDVYTSSIPPLKHPSQYEGVFCTDGSAIKSPDPTKSNNAGMGIVHAIYNPEYKILNQWSIPLGHHTAQMAEIAAVEFACKKALKVPGPVLVITDSFYVAESANKELPYWKSNGFVNNKKEPLKHISKWKSIAECLSIKPDITIQHEKGHQPINTSIHTEGNALADKLATQGSYVVN

SEQ ID NO: 8121 - protein, 662 aa, synthetic construct
VPWLTQQPLQLTILVPLQEYQDRILNKTALPEEQKQQLKALFTKYDNLWQHWENQVGHRKIRPHNIATGDYPPRPQKQYPINPKAKPSIQIVIDDLLKQGVLTPQNSTMNTPVYPVPKPDGRWRMVLDYREVNKTIPLTAAQNQHSAGILATIVRQKYKTTLDLANGFWAHPITPDSYWLTAFTWQGKQYCWTRLPQGFLNSPALFNADAVDLLKEVPNVQVYVDDIYLSHDNPHEHIQQLEKVFQILLQAGYVVSLKKSEIGQRTVEFLGFNITKEGRGLTDTFKTKLLNVTPPKDLKQLQSILGLLNFARNFIPNFAELVQTLYNLIASSPGKYIEWTEDNTKQLNKVIEALNTASNLEERLPDQRLVIKVNTSPSAGYVRYYNESGKKPIMYLNYVFSKAELKFSMLEKLLTTMHKALIKAMDLAMGQEILVYSPIVSMTKIQKTPLPERKALPIRWITWMTYLEDPRIQFHYDKTLPELKHIPDVYTSSIPPLKHPSQYEGVFCTDGSAIKSPDPTKSNNAGMGIVHAIYNPEYKILNQWSIPLGHHTAQMAEIAAVEFACKKALKVPGPVLVITDSFYVAESANKELPYWKSNGFVNNKKEPLKHISKWKSIAECLSIKPDITIQHEKGHQPINTSIHTEGNALADKLATQGSYVVN

SEQ ID NO: 8122 - protein, 662 aa, synthetic construct
VPWLTQQPLQLTILVPLQEYQDRILNKTALPEEQKQQLKALFTKYDNLWQHWENQVGHRKIRPHNIATGDYPPRPQKQYPINPKAKPSIQIVIDDLLKQGVLTPQNSTMNTPVYPVPKPDGRWRMVLDYREVNKTIPLTAAQNQHSAGILATIVRQKYKTTLDLANGFWAHPITPDSYWLTAFTWQGKQYCWTRLPQGFLNSPALFNADAVDLLKEVPNVQVYVDDIYLSHDNPHEHIQQLEKVFQILLQAGYVVSLKKSEIGQRTVEFLGFNITKEGRGLTDTFKTKLLNVTPPKDLKQLQSILGKLNFARNFIPNFAELVQTLYNLIASSPGKYIEWTEDNTKQLNKVIEALNTASNLEERLPDQRLVIKVNTSPSAGYVRYYNESGKKPIMYLNYVFSKAELKFSMLEKLLTTMHKALIKAMDLAMGQEILVYSPIVSMTKIQKTPLPERKALPIRWITWMTYLEDPRIQFHYDKTLPELKHIPDVYTSSIPPLKHPSQYEGVFCTDGSAIKSPDPTKSNNAGMGIVHAIYNPEYKILNQWSIPLGHHTAQMAEIAAVEFACKKALKVPGPVLVITDSFYVAESANKELPYWKSNGFVNNKKEPLKHISKWKSIAECLSIKPDITIQHEKGHQPINTSIHTEGNALADKLATQGSYVVN

SEQ ID NO: 8123 - protein, 592 aa, Squirrel monkey retrovirus
PRSRAIDIPVPHADKISWKITDPVWVDQWPLTYEKTLAAIALVQEQLAAGHIEPTNSPWNTPIFIIKKKSGSWRLLQDLRAVNKVMVPMGALQPGLPSPVAIPLNYHKIVIDLKDCFFTIPLHPEDRPYFAFSVPQINFQSPMPRYQWKVLPQGMANSPTLCQKFVAAAIAPVRSQWPEAYILHYMDDILLACDSAEAAKACYAHIISCLTSYGLKIAPDKVQVSEPFSYLGFELHHQQVFTPRVCLKTDHLKTLNDFQKLLGDIQWLRPYLKLPTSALVPLNNILKGDPNPLSVRALTPEAKQSLALINKAIQNQSVQQISYNLPLVLLLLPTPHTPTAVFWQPNGTDPTKNGSPLLWLHLPASPSKVLLTYPSLLAMLIIKGRYTGRQLFGRDPHSIIIPYTQDQLTWLLQTSDEWAIALSSFTGDIDNHYPSDPVIQFAKLHQFIFPKITKCAPIPQATLVFTDGSSNGIAAYVIDNQPISIKSPYLSAQLVELYAILQVFTVLAHQPFNLYTDSAYIAQSVPLLETVPFIKSSTNATPLFSKLQQLILNRQHPFFIGHLRAHLNLPGPLAEGNALADAATQIFPIISD

SEQ ID NO: 8124 - protein, 592 aa, synthetic construct
PRSRAIDIPVPHADKISWKITDPVWVDQWPLTYEKTLAAIALVQEQLAAGHIEPTNSPWNTPIFIIKKKSGSWRLLQDLRAVNKVMVPMGALQPGLPSPVAIPLNYHKIVIDLKDCFFTIPLHPEDRPYFAFSVPQINFQSPMPRYQWKVLPQGMANSPTLCQKFVAAAIAPVRSQWPEAYILHYMDDILLACDSAEAAKACYAHIISCLTSYGLKIAPDKVQVSEPFSYLGFELHHQQVFTPRVCLKTDHLKTLNDFQKLLGDIQWLRPYLKLPTSALVPLNNILKPDPNPLSVRALTPEAKQSLALINKAIQNQSVQQISYNLPLVLLLLPTPHTPTAVFWQPNGTDPTKNGSPLLWLHLPASPSKVLLTYPSLLAMLIIKGRYTGRQLFGRDPHSIIIPYTQDQLTWLLQTSDEWAIALSSFTGDIDNHYPSDPVIQFAKLHQFIFPKITKCAPIPQATLVFTDGSSNGIAAYVIDNQPISIKSPYLSAQLVELYAILQVFTVLAHQPFNLYTDSAYIAQSVPLLETVPFIKSSTNATPLFSKLQQLILNRQHPFFIGHLRAHLNLPGPLAEGNALADAATQIFPIISD

SEQ ID NO: 8125 - protein, 592 aa, synthetic construct
PRSRAIDIPVPHADKISWKITDPVWVDQWPLTYEKTLAAIALVQEQLAAGHIEPTNSPWNTPIFIIKKKSGSWRLLQDLRAVNKVMVPMGALQPGLPSPVAPPLNYHKIVIDLKDCFFTIPLHPEDRPYFAFSVPQINFQSPMPRYQWKVLPQGMANSPTLCQKFVAAAIAPVRSQWPEAYILHYMDDILLACDSAEAAKACYAHIISCLTSYGLKIAPDKVQVSEPFSYLGFELHHQQVFTPRVCLKTDHLKTLNDFQKLLGDIQWLRPYLKLPTSALVPLNNILKPDPNPLSVRALTPEAKQSLALINKAIQNQSVQQISYNLPLVLLLLPTPHTPTAVFWQPNGTDPTKNGSPLLWLHLPASPSKVLLTYPSLLAMLIIKGRYTGRQLFGRDPHSIIIPYTQDQLTWLLQTSDEWAIALSSFTGDIDNHYPSDPVIQFAKLHQFIFPKITKCAPIPQATLVFTDGSSNGIAAYVIDNQPISIKSPYLSAQLVELYAILQVFTVLAHQPFNLYTDSAYIAQSVPLLETVPFIKSSTNATPLFSKLQQLILNRQHPFFIGHLRAHLNLPGPLAEGNALADAATQIFPIISD

SEQ ID NO: 8126 - protein, 585 aa, unidentified
LATAVDILAPQRYADPITWKSDEPVWVDQWPLTQEKLAAAQQLVQEQLQAGHIIESNSPWNTPIFVIKKKSGKWRLLQDLRAVNATMVLMGALQPGLPSPVAIPQGYFKIVIDLKDCFFTIPLQPVDQKRFAFSLPSTNFKQPMKRYQWKVLPQGMANSPTLCQKYVAAAIEPVRKSWAQMYIIHYMDDILIAGKLGEQVLQCFAQLKQALTTTGLQIAPEKVQLQDPYTYLGFQINGPKITNQKAVIRRDKLQTLNDFQKLLGDINWLRPYLHLTTGDLKPLFDILKGDSNPNSPRSLSEAALASLQKVETAIAEQFVTQIDYTQPLTFLIFNTTLTPTGLFWQNNPVMWVHLPASPKKVLLPYYDAIADLIILGRDNSKKYFGLEPSTIIQPYSKSQIHWLMQNTETWPIACASYAGNIDNHYPPNKLIQFCKLHAVVFPRIISKTPLDNALLVFTDGSSTGIAAYTFEKTTVRFKTSHTSAQLVELQALIAVLSAFPHRALNVYTDSAYLAHSIPLLETVSHIKHISDTAKFFLQCQQLIYNRSIPFYLGHIRAHSGLPGPLSQGNHITDLATKVVATTLTT

SEQ ID NO: 8127 - protein, 585 aa, synthetic construct
LATAVDILAPQRYADPITWKSDEPVWVDQWPLTQEKLAAAQQLVQEQLQAGHIIESNSPWNTPIFVIKKKSGKWRLLQDLRAVNATMVLMGALQPGLPSPVAPPQGYFKIVIDLKDCFFTIPLQPVDQKRFAFSLPSTNFKQPMKRYQWKVLPQGMANSPTLCQKYVAAAIEPVRKSWAQMYIIHYMDDILIAGKLGEQVLQCFAQLKQALTTTGLQIAPEKVQLQDPYTYLGFQINGPKITNQKAVIRRDKLQTLNDFQKLLGDINWLRPYLHLTTGDLKPLFDILKGDSNPNSPRSLSEAALASLQKVETAIAEQFVTQIDYTQPLTFLIFNTTLTPTGLFWQNNPVMWVHLPASPKKVLLPYYDAIADLIILGRDNSKKYFGLEPSTIIQPYSKSQIHWLMQNTETWPIACASYAGNIDNHYPPNKLIQFCKLHAVVFPRIISKTPLDNALLVFTDGSSTGIAAYTFEKTTVRFKTSHTSAQLVELQALIAVLSAFPHRALNVYTDSAYLAHSIPLLETVSHIKHISDTAKFFLQCQQLIYNRSIPFYLGHIRAHSGLPGPLSQGNHITDLATKVVATTLTT

SEQ ID NO: 8128 - protein, 650 aa, Walleye dermal sarcoma virus
SCQTKNTLNIDEYLLQFPDQLWASLPTDIGRMLVPPITIKIKDNASLPSIRQYPLPKDKTEGLRPLISSLENQGILIKCHSPCNTPIFPIKKAGRDEYRMIHDLRAINNIVAPLTAVVASPTTVLSNLAPSLHWFTVIDLSNAFFSVPIHKDSQYLFAFTFEGHQYTWTVLPQGFIHSPTLFSQALYQSLHKIKFKISSEICIYMDDVLIASKDRDTNLKDTAVMLQHLASEGHKVSKKKLQLCQQEVVYLGQLLTPEGRKILPDRKVTVSQFQQPTTIRQIRAFLGLVGYCRHWIPEFSIHSKFLEKQLKKDTAEPFQLDDQQVEAFNKLKHAITTAPVLVVPDPAKPFQLYTSHSEHASIAVLTQKHAGRTRPIAFLSSKFDAIESGLPPCLKACASIHRSLTQADSFILGAPLIIYTTHAICTLLQRDRSQLVTASRFSKWEADLLRPELTFVACSAVSPAHLYMQSCENNIPPHDCVLLTHTISRPRPDLSDLPIPDPDMTLFSDGSYTTGRGGAAVVMHRPVTDDFIIIHQQPGGASAQTAELLALAAACHLATDKTVNIYTDSRYAYGVVHDFGHLWMHRGFVTSAGTPIKNHKEIEYLLKQIMKPKQVSVIKIEAHTKGVSMEVRGNAAADEAAKNAVFLVQR

SEQ ID NO: 8129 - protein, 650 aa, synthetic construct
SCQTKNTLNIDEYLLQFPDQLWASLPTDIGRMLVPPITIKIKDNASLPSIRQYPLPKDKTEGLRPLISSLENQGILIKCHSPCNTPIFPIKKAGRDEYRMIHDLRAINNIVAPLTAVVASPTTVLSNLAPSLHWFTVIDLSNAFFSVPIHKDSQYLFAFTFEGHQYTWTVLPQGFIHSPTLFNQALYQSLHKIKFKISSEICIYMDDVLIASKDRDTNLKDTAVMLQHLASEGHKVSKKKLQLCQQEVVYLGQLLTPEGRKILPDRKVTVSQFQQPTTIRQIRAFLGLVGYCRHWIPEFSIHSKFLEKQLKPDTAEPFQLDDQQVEAFNKLKHAITTAPVLVVPDPAKPFQLYTSHSEHASIAVLTQKHAGRTRPIAFLSSKFDAIESGLPPCLKACASIHRSLTQADSFILGAPLIIYTTHAICTLLQRDRSQLVTASRFSKWEADLLRPELTFVACSAVSPAHLYMQSCENNIPPHDCVLLTHTISRPRPDLSDLPIPDPDMTLFSDGSYTTGRGGAAVVMHRPVTDDFIIIHQQPGGASAQTAELLALAAACHLATDKTVNIYTDSRYAYGVVHDFGHLWMHRGFVTSAGTPIKNHKEIEYLLKQIMKPKQVSVIKIEAHTKGVSMEVRGNAAADEAAKNAVFLVQR

SEQ ID NO: 8130 - protein, 650 aa, synthetic construct
SCQTKNTLNIDEYLLQFPDQLWASLPTDIGRMLVPPITIKIKDNASLPSIRQYPLPKDKTEGLRPLISSLENQGILIKCHSPCNTPIFPIKKAGRDEYRMIHDLRAINNIVAPLTAVVASPTTVLSNLAPSLHWFTVIDLSNAFFSVPIHKDSQYLFAFTFEGHQYTWTVLPQGFIHSPTLFNQALYQSLHKIKFKISSEICIYMDDVLIASKDRDTNLKDTAVMLQHLASEGHKVSKKKLQLCQQEVVYLGQLLTPEGRKILPDRKVTVSQFQQPTTIRQIRAFLGKVGYCRHFIPEFSIHSKFLEKQLKPDTAEPFQLDDQQVEAFNKLKHAITTAPVLVVPDPAKPFQLYTSHSEHASIAVLTQKHAGRTRPIAFLSSKFDAIESGLPPCLKACASIHRSLTQADSFILGAPLIIYTTHAICTLLQRDRSQLVTASRFSKWEADLLRPELTFVACSAVSPAHLYMQSCENNIPPHDCVLLTHTISRPRPDLSDLPIPDPDMTLFSDGSYTTGRGGAAVVMHRPVTDDFIIIHQQPGGASAQTAELLALAAACHLATDKTVNIYTDSRYAYGVVHDFGHLWMHRGFVTSAGTPIKNHKEIEYLLKQIMKPKQVSVIKIEAHTKGVSMEVRGNAAADEAAKNAVFLVQR

SEQ ID NO: 8131 - protein, 669 aa, Woolly monkey sarcoma virus
VLNLEEEYRLHEKPVPSSIDPSWLQLFPTVWAERAGMGLANQVPPVVVELRSGASPVAVRQYPMSKEAREGIRPHIQRFLDLGVLVPCQSPWNTPLLPVKKPGTNDYRPVQDLREINKRVQDIHPTVPNPYNLLSSLPPSHTWYSVLDLKDAFFCLKLHPNSQPLFAFEWRDPEKGNTGQLTWTRLPQGFKNSPTLFDEALHRDLAPFRALNPQVVLLQYVDDLLVAAPTYRDCKEGTQKLLQELSKLGYRVSAKKAQLCQKEVTYLGYLLKEGKRWLTPARKATVMKIPPPTTPRQVREFLGTAGFCRLWIPGFASLAAPLYPLTKESIPFIWTEEHQKAFDRIKEALLSAPALALPDLTKPFTLYVDERAGVARGVLTQTLGPWRRPVAYLSKKLDPVASGWPTCLKAVAAVALLLKDADKLTLGQNVTVIASHSLESIVRQPPDRWMTNARMTHYQSLLLNERVSFAPPAVLNPATLLPVESEATPVHRCSEILAEETGTRRDLKDQPLPGVPAWYTDGSSFIAEGKRRAGAAIVDGKRTVWASSLPEGTSAQKAELVALTQALRLAEGKDINIYTDSRYAFATAHIHGAIYKQRGLLTSAGKDIKNKEEILALLEAIHLPKRVAIIHCPGHQKGNDPVATGNRRADEAAKQAALSTRVLAETTKP

SEQ ID NO: 8132 - protein, 669 aa, synthetic construct
VLNLEEEYRLHEKPVPSSIDPSWLQLFPTVWAERAGMGLANQVPPVVVELRSGASPVAVRQYPMSKEAREGIRPHIQRFLDLGVLVPCQSPWNTPLLPVKKPGTNDYRPVQDLREINKRVQDIHPTVPNPYNLLSSLPPSHTWYSVLDLKDAFFCLKLHPNSQPLFAFEWRDPEKGNTGQLTWTRLPQGFKNSPTLFNEALHRDLAPFRALNPQVVLLQYVDDLLVAAPTYRDCKEGTQKLLQELSKLGYRVSAKKAQLCQKEVTYLGYLLKEGKRWLTPARKATVMKIPPPTTPRQVREFLGTAGFCRLWIPGFASLAAPLYPLTKPSIPFIWTEEHQKAFDRIKEALLSAPALALPDLTKPFTLYVDERAGVARGVLTQTLGPWRRPVAYLSKKLDPVASGWPTCLKAVAAVALLLKDADKLTLGQNVTVIASHSLESIVRQPPDRWMTNARMTHYQSLLLNERVSFAPPAVLNPATLLPVESEATPVHRCSEILAEETGTRRDLKDQPLPGVPAWYTDGSSFIAEGKRRAGAAIVDGKRTVWASSLPEGTSAQKAELVALTQALRLAEGKDINIYTDSRYAFATAHIHGAIYKQRGWLTSAGKDIKNKEEILALLEAIHLPKRVAIIHCPGHQKGNDPVATGNRRADEAAKQAALSTRVLAETTKP

SEQ ID NO: 8133 - protein, 669 aa, synthetic construct
VLNLEEEYRLHEKPVPSSIDPSWLQLFPTVWAERAGMGLANQVPPVVVELRSGASPVAVRQYPMSKEAREGIRPHIQRFLDLGVLVPCQSPWNTPLLPVKKPGTNDYRPVQDLREINKRVQDIHPTVPNPYNLLSSLPPSHTWYSVLDLKDAFFCLKLHPNSQPLFAFEWRDPEKGNTGQLTWTRLPQGFKNSPTLFNEALHRDLAPFRALNPQVVLLQYVDDLLVAAPTYRDCKEGTQKLLQELSKLGYRVSAKKAQLCQKEVTYLGYLLKEGKRWLTPARKATVMKIPPPTTPRQVREFLGKAGFCRLFIPGFASLAAPLYPLTKPSIPFIWTEEHQKAFDRIKEALLSAPALALPDLTKPFTLYVDERAGVARGVLTQTLGPWRRPVAYLSKKLDPVASGWPTCLKAVAAVALLLKDADKLTLGQNVTVIASHSLESIVRQPPDRWMTNARMTHYQSLLLNERVSFAPPAVLNPATLLPVESEATPVHRCSEILAEETGTRRDLKDQPLPGVPAWYTDGSSFIAEGKRRAGAAIVDGKRTVWASSLPEGTSAQKAELVALTQALRLAEGKDINIYTDSRYAFATAHIHGAIYKQRGWLTSAGKDIKNKEEILALLEAIHLPKRVAIIHCPGHQKGNDPVATGNRRADEAAKQAALSTRVLAETTKP

SEQ ID NO: 8134 - protein, 671 aa, unidentified
TLNIEDEYRLHETSKEPDVPLGSTWLSDFPQAWAETGGMGLAVRQAPLIIPLKATSTPVSIKQYPMSQEARLGIKPHIQRLLDQGILVPCQSPWNTPLLPVKKPGTNDYRPVQDLREVNKRVEDIHPTVPNPYNLLSGLPPSHQWYTVLDLKDAFFCLRLHPTSQPLFAFEWRDPEMGISGQLTWTRLPQGFKNSPTLFDEALHRDLADFRIQHPDLILLQYVDDLLLAATSEQDCQRGTRALLQTLGNLGYRASAKKAQICQKQVKYLGYLLKEGQRWLTEARKETVMGQPTPKTPRQLREFLGTAGFCRLWIPGFAEMAAPLYPLTKTGTLFNWGPDQQKAYQEIKQALLTAPALGLPDLTKPFELFVDEKQGYAKGVLTQKLGPWRRPVAYLSKKLDPVAAGWPPCLRMVAAIAVLTKDAGKLTMGQPLVILAPHAVEALVKQPPDRWLSNARMTHYQAMLLDTDRVQFGPVVALNPATLLPLPEKEAPHDCLEILAETHGTRPDLTDQPIPDADYTWYTDGSSFLQEGQRRAGAAVTTETEVIWARALPAGTSAQRAELIALTQALKMAEGKKLNVYTDSRYAFATAHVHGEIYRRRGLLTSEGREIKNKNEILALLKALFLPKRLSIIHCPGHQKGNSAEARGNRMADQAAREAAMKAVLETSTLL

SEQ ID NO: 8135 - protein, 671 aa, synthetic construct
TLNIEDEYRLHETSKEPDVPLGSTWLSDFPQAWAETGGMGLAVRQAPLIIPLKATSTPVSIKQYPMSQEARLGIKPHIQRLLDQGILVPCQSPWNTPLLPVKKPGTNDYRPVQDLREVNKRVEDIHPTVPNPYNLLSGLPPSHQWYTVLDLKDAFFCLRLHPTSQPLFAFEWRDPEMGISGQLTWTRLPQGFKNSPTLFNEALHRDLADFRIQHPDLILLQYVDDLLLAATSEQDCQRGTRALLQTLGNLGYRASAKKAQICQKQVKYLGYLLKEGQRWLTEARKETVMGQPTPKTPRQLREFLGTAGFCRLWIPGFAEMAAPLYPLTKPGTLFNWGPDQQKAYQEIKQALLTAPALGLPDLTKPFELFVDEKQGYAKGVLTQKLGPWRRPVAYLSKKLDPVAAGWPPCLRMVAAIAVLTKDAGKLTMGQPLVILAPHAVEALVKQPPDRWLSNARMTHYQAMLLDTDRVQFGPVVALNPATLLPLPEKEAPHDCLEILAETHGTRPDLTDQPIPDADYTWYTDGSSFLQEGQRRAGAAVTTETEVIWARALPAGTSAQRAELIALTQALKMAEGKKLNVYTDSRYAFATAHVHGEIYRRRGWLTSEGREIKNKNEILALLKALFLPKRLSIIHCPGHQKGNSAEARGNRMADQAAREAAMKAVLETSTLL

SEQ ID NO: 8136 - protein, 671 aa, synthetic construct
TLNIEDEYRLHETSKEPDVPLGSTWLSDFPQAWAETGGMGLAVRQAPLIIPLKATSTPVSIKQYPMSQEARLGIKPHIQRLLDQGILVPCQSPWNTPLLPVKKPGTNDYRPVQDLREVNKRVEDIHPTVPNPYNLLSGLPPSHQWYTVLDLKDAFFCLRLHPTSQPLFAFEWRDPEMGISGQLTWTRLPQGFKNSPTLFNEALHRDLADFRIQHPDLILLQYVDDLLLAATSEQDCQRGTRALLQTLGNLGYRASAKKAQICQKQVKYLGYLLKEGQRWLTEARKETVMGQPTPKTPRQLREFLGKAGFCRLFIPGFAEMAAPLYPLTKPGTLFNWGPDQQKAYQEIKQALLTAPALGLPDLTKPFELFVDEKQGYAKGVLTQKLGPWRRPVAYLSKKLDPVAAGWPPCLRMVAAIAVLTKDAGKLTMGQPLVILAPHAVEALVKQPPDRWLSNARMTHYQAMLLDTDRVQFGPVVALNPATLLPLPEKEAPHDCLEILAETHGTRPDLTDQPIPDADYTWYTDGSSFLQEGQRRAGAAVTTETEVIWARALPAGTSAQRAELIALTQALKMAEGKKLNVYTDSRYAFATAHVHGEIYRRRGWLTSEGREIKNKNEILALLKALFLPKRLSIIHCPGHQKGNSAEARGNRMADQAAREAAMKAVLETSTLL

SEQ ID NO: 8137 - protein, 46 aa, synthetic construct; identical to SEQ ID NO: 5217

SEQ ID NO: 8138 - protein, 46 aa, synthetic construct; identical to SEQ ID NO: 5217

SEQ ID NO: 8139 - protein, 46 aa, synthetic construct; identical to SEQ ID NO: 5217

SEQ ID NO: 8140 - protein, 46 aa, synthetic construct; identical to SEQ ID NO: 5217

SEQ ID NO: 8141 - protein, 20 aa, synthetic construct
GGGGSGGGGSGGGGSGGGGS

SEQ ID NO: 8142 - protein, 30 aa, synthetic construct; identical to SEQ ID NO: 5112

SEQ ID NO: 8143 - protein, 30 aa, synthetic construct; identical to SEQ ID NO: 5112

SEQ ID NO: 8144 - protein, 18 aa, synthetic construct
GSSGSSGSSGSSGSSGSS

SEQ ID NO: 8145 - protein, 20 aa, synthetic construct
EAAAKEAAAKEAAAKEAAAK

SEQ ID NO: 8146 - protein, 30 aa, synthetic construct; identical to SEQ ID NO: 5130

SEQ ID NO: 8147 - protein, 11 aa, synthetic construct
PAPAPAPAPAP

SEQ ID NO: 8148 - protein, 13 aa, synthetic construct
PAPAPAPAPAPAP

SEQ ID NO: 8149 - protein, 13 aa, synthetic construct
PAPAPAPAPAPAP

SEQ ID NO: 8150 - protein, 13 aa, synthetic construct
PAPAPAPAPAPAP

SEQ ID NO: 8151 - protein, 13 aa, synthetic construct
PAPAPAPAPAPAP

SEQ ID NO: 8152 - protein, 13 aa, synthetic construct
PAPAPAPAPAPAP

SEQ ID NO: 8153 - protein, 8 aa, synthetic construct
EAAAKGGG

SEQ ID NO: 8154 - protein, 8 aa, synthetic construct
EAAAKGGG

SEQ ID NO: 8155 - protein, 6 aa, synthetic construct
PAPGGG

SEQ ID NO: 8156 - protein, 9 aa, synthetic construct
GGGGSSGGS

SEQ ID NO: 8157 - protein, 11 aa, synthetic construct
GGGGGSEAAAK

SEQ ID NO: 8158 - protein, 11 aa, synthetic construct
GGGEAAAKGGS

SEQ ID NO: 8159 - protein, 11 aa, synthetic construct
GGGEAAAKGGS

SEQ ID NO: 8160 - protein, 11 aa, synthetic construct
GGGEAAAKGGS

SEQ ID NO: 8161 - protein, 9 aa, synthetic construct
GGSGGGPAP

SEQ ID NO: 8162 - protein, 9 aa, synthetic construct
PAPGGSGGG

SEQ ID NO: 8163 - protein, 9 aa, synthetic construct
PAPGGSGGG

SEQ ID NO: 8164 - protein, 11 aa, synthetic construct
GGSEAAAKPAP

SEQ ID NO: 8165 - protein, 11 aa, synthetic construct
GGSPAPEAAAK

SEQ ID NO: 8166 - protein, 11 aa, synthetic construct
GGSPAPEAAAK

SEQ ID NO: 8167 - protein, 11 aa, synthetic construct
EAAAKGGSPAP

SEQ ID NO: 8168 - protein, 11 aa, synthetic construct
EAAAKGGSPAP

SEQ ID NO: 8169 - protein, 11 aa, synthetic construct
EAAAKPAPGGS

SEQ ID NO: 8170 - protein, 11 aa, synthetic construct
EAAAKPAPGGS

SEQ ID NO: 8171 - protein, 11 aa, synthetic construct
GGGGSSEAAAK

SEQ ID NO: 8172 - protein, 11 aa, synthetic construct
GGGGSSEAAAK

SEQ ID NO: 8173 - protein, 11 aa, synthetic construct
GSSGGGEAAAK

SEQ ID NO: 8174 - protein, 11 aa, synthetic construct
GSSGGGEAAAK

SEQ ID NO: 8175 - protein, 11 aa, synthetic construct
GSSEAAAKGGG

SEQ ID NO: 8176 - protein, 9 aa, synthetic construct
GSSGGGPAP

SEQ ID NO: 8177 - protein, 9 aa, synthetic construct
GSSPAPGGG

SEQ ID NO: 8178 - protein, 9 aa, synthetic construct
PAPGGGGSS

SEQ ID NO: 8179 - protein, 11 aa, synthetic construct
GGGEAAAKPAP

SEQ ID NO: 8180 - protein, 11 aa, synthetic construct
GGGEAAAKPAP

SEQ ID NO: 8181 - protein, 11 aa, synthetic construct
GGGPAPEAAAK

SEQ ID NO: 8182 - protein, 11 aa, synthetic construct
GSSEAAAKPAP

SEQ ID NO: 8183 - protein, 11 aa, synthetic construct
GSSEAAAKPAP

SEQ ID NO: 8184 - protein, 11 aa, synthetic construct
GSSPAPEAAAK

SEQ ID NO: 8185 - protein, 11 aa, synthetic construct
GSSPAPEAAAK

SEQ ID NO: 8186 - protein, 11 aa, synthetic construct
GSSPAPEAAAK

SEQ ID NO: 8187 - protein, 11 aa, synthetic construct
PAPGSSEAAAK

SEQ ID NO: 8188 - protein, 11 aa, synthetic construct
PAPGSSEAAAK

SEQ ID NO: 8189 - protein, 46 aa, synthetic construct; identical to SEQ ID NO: 5217

SEQ ID NO: 8190 - protein, 46 aa, synthetic construct; identical to SEQ ID NO: 5217

SEQ ID NO: 8191 - protein, 46 aa, synthetic construct; identical to SEQ ID NO: 5217

SEQ ID NO: 8192 - protein, 46 aa, synthetic construct; identical to SEQ ID NO: 5217

SEQ ID NO: 8193 - protein, 46 aa, synthetic construct; identical to SEQ ID NO: 5217

SEQ ID NO: 8194 - protein, 46 aa, synthetic construct; identical to SEQ ID NO: 5217

SEQ ID NO: 8195 - protein, 46 aa, synthetic construct; identical to SEQ ID NO: 5217

SEQ ID NO: 8196 - protein, 16 aa, synthetic construct
SGSETPGTSESATPES

SEQ ID NO: 8197 - protein, 1367 aa, synthetic construct
DKKYSIGLDIGTNSVGWAVITDEYKVPSKKFKVLGNTDRHSIKKNLIGALLFDSGETAEATRLKRTARRRYTRRKNRICYLQEIFSNEMAKVDDSFFHRLEESFLVEEDKKHERHPIFGNIVDEVAYHEKYPTIYHLRKKLVDSTDKADLRLIYLALAHMIKFRGHFLIEGDLNPDNSDVDKLFIQLVQTYNQLFEENPINASGVDAKAILSARLSKSRRLENLIAQLPGEKKNGLFGNLIALSLGLTPNFKSNFDLAEDAKLQLSKDTYDDDLDNLLAQIGDQYADLFLAAKNLSDAILLSDILRVNTEITKAPLSASMIKRYDEHHQDLTLLKALVRQQLPEKYKEIFFDQSKNGYAGYIDGGASQEEFYKFIKPILEKMDGTEELLVKLNREDLLRKQRTFDNGSIPHQIHLGELHAILRRQEDFYPFLKDNREKIEKILTFRIPYYVGPLARGNSRFAWMTRKSEETITPWNFEEVVDKGASAQSFIERMTNFDKNLPNEKVLPKHSLLYEYFTVYNELTKVKYVTEGMRKPAFLSGEQKKAIVDLLFKTNRKVTVKQLKEDYFKKIECFDSVEISGVEDRFNASLGTYHDLLKIIKDKDFLDNEENEDILEDIVLTLTLFEDREMIEERLKTYAHLFDDKVMKQLKRRRYTGWGRLSRKLINGIRDKQSGKTILDFLKSDGFANRNFMQLIHDDSLTFKEDIQKAQVSGQGDSLHEHIANLAGSPAIKKGILQTVKVVDELVKVMGRHKPENIVIEMARENQTTQKGQKNSRERMKRIEEGIKELGSQILKEHPVENTQLQNEKLYLYYLQNGRDMYVDQELDINRLSDYDVDHIVPQSFLKDDSIDNKVLTRSDKARGKSDNVPSEEVVKKMKNYWRQLLNAKLITQRKFDNLTKAERGGLSELDKAGFIKRQLVETRQITKHVAQILDSRMNTKYDENDKLIREVKVITLKSKLVSDFRKDFQFYKVREINNYHHAHDAYLNAVVGTALIKKYPKLESEFVYGDYKVYDVRKMIAKSEQEIGKATAKYFFYSNIMNFFKTEITLANGEIRKRPLIETNGETGEIVWDKGRDFATVRKVLSMPQVNIVKKTEVQTGGFSKESILPKRNSDKLIARKKDWDPKKYGGFDSPTVAYSVLVVAKVEKGKSKKLKSVKELLGITIMERSSFEKNPIDFLEAKGYKEVKKDLIIKLPKYSLFELENGRKRMLASAGELQKGNELALPSKYVNFLYLASHYEKLKGSPEDNEQKQLFVEQHKHYLDEIIEQISEFSKRVILADANLDKVLSAYNKHRDKPIREQAENIIHLFTLTNLGAPAAFKYFDTTIDRKRYTSTKEVLDATLIHQSITGLYETRIDLSQLGGD

SEQ ID NO: 8198 - protein, 10 aa, synthetic construct
KRTADGSEFE

SEQ ID NO: 8199 - protein, 19 aa, synthetic construct
KRTADGSEFESPKKKAKVE

SEQ ID NO: 8200 - protein, 29 aa, synthetic construct
KRTADGSEFEKRTADGSEFESPKKKAKVE

SEQ ID NO: 8201 - RNA, 14 nt, synthetic construct
  source 1..14: mol_type = other RNA
ttgcgttcgcgcaa

SEQ ID NO: 8202 - RNA, 14 nt, synthetic construct
  source 1..14: mol_type = other RNA
acgctgcaaagcgt

SEQ ID NO: 8203 - RNA, 24 nt, synthetic construct
  source 1..24: mol_type = other RNA
gctcccgctagcaatagcgggagt

SEQ ID NO: 8204 - RNA, 24 nt, synthetic construct
  source 1..24: mol_type = other RNA
agacgcgaacttcggttcgcgtct

SEQ ID NO: 8205 - RNA, 34 nt, synthetic construct
  source 1..34: mol_type = other RNA
cgggacctaacgtgattcgtcacgttaggtcccg

SEQ ID NO: 8206 - RNA, 34 nt, synthetic construct
  source 1..34: mol_type = other RNA
gcaacgacgacccgagcaatcgggtcgtcgttgt

SEQ ID NO: 8207 - RNA, 62 nt, synthetic construct
  source 1..62: mol_type = other RNA
ttgcctagtgttgaggtgttcgcacctcaacttcatagatccgcaaggatctatctaggcaa

SEQ ID NO: 8208 - RNA, 62 nt, synthetic construct
  source 1..62: mol_type = other RNA
atcgctcgaggtgaagagttcgcttttcatcaaatcgaagccgcaaggtttcgacgagcgat

SEQ ID NO: 8209 - RNA, 74 nt, synthetic construct
  source 1..74: mol_type = other RNA
ttgccatgtgtatgtgggttttttttttcccacatactctgatgatccttttttttttggatcattcatggcaa

SEQ ID NO: 8210 - RNA, 22 nt, synthetic construct
  source 1..22: mol_type = other RNA
ggggagtgggagggacagaggg

SEQ ID NO: 8211 - RNA, 44 nt, synthetic construct
  source 1..44: mol_type = other RNA
gggaactgtgatggggtgggcagggctgggagaactttgtacag

SEQ ID NO: 8212 - RNA, 50 nt, synthetic construct
  source 1..50: mol_type = other RNA
aggaaaataacataagacacgcaactcaaacatactcaaacaacgccacc

SEQ ID NO: 8213 - RNA, 50 nt, synthetic construct
  source 1..50: mol_type = other RNA
aggataataacataagatactaactaataaatactaaactcaacgccacc

SEQ ID NO: 8214 - RNA, 50 nt, synthetic construct
  source 1..50: mol_type = other RNA
aggataatatacttacatacttactaattaatactaaactcaacgccacc

SEQ ID NO: 8215 - RNA, 50 nt, synthetic construct
  source 1..50: mol_type = other RNA
aggatcaacacaacatactaaaaaactctatacaatacaaattagccacc

SEQ ID NO: 8216 - RNA, 50 nt, synthetic construct
  source 1..50: mol_type = other RNA
aggatcacacaacaactcacactactcatacatcgacacacatagccacc

SEQ ID NO: 8217 - RNA, 50 nt, synthetic construct
  source 1..50: mol_type = other RNA
aggaacaacacaacaaactaaaaaacacaatacaaaacaaataagccacc

SEQ ID NO: 8218 - RNA, 60 nt, synthetic construct
  source 1..60: mol_type = other RNA
aggatcacacaacaactcacactactcatacatcgacacacataccccggcgccgccacc

SEQ ID NO: 8219 - RNA, 50 nt, synthetic construct
  source 1..50: mol_type = other RNA
aggacaaacattacacaactaaataaacaactatcaattaaccggccacc

SEQ ID NO: 8220 - RNA, 50 nt, synthetic construct
  source 1..50: mol_type = other RNA
aggacaaacacaacacaactaaataaacaactaacaatacaaccgccacc

SEQ ID NO: 8221 - RNA, 50 nt, synthetic construct
  source 1..50: mol_type = other RNA
aggacaatcacaatcatactaatatatcaactatcaattaatcggccacc

SEQ ID NO: 8222 - RNA, 50 nt, synthetic construct
  source 1..50: mol_type = other RNA
aggacatataaaacaacactatcactaacaactatcaaaatcaggccacc

SEQ ID NO: 8223 - RNA, 50 nt, synthetic construct
  source 1..50: mol_type = other RNA
aggacatatataacaacactatcactatcaactatcataatctcgccacc

SEQ ID NO: 8224 - RNA, 50 nt, synthetic construct
  source 1..50: mol_type = other RNA
aggacacacaaaacaacacacaaatcaacaactaacaaaatcacgccacc

SEQ ID NO: 8225 - RNA, 60 nt, synthetic construct
  source 1..60: mol_type = other RNA
aggacacacaaaacaacacacaaatcaacaactaacaaaatcacccccggcgccgccacc

SEQ ID NO: 8226 - RNA, 50 nt, synthetic construct
  source 1..50: mol_type = other RNA
aggaacataaacatcaaaactaaacaacaaatcaacacaacaacgccacc

SEQ ID NO: 8227 - RNA, 50 nt, synthetic construct
  source 1..50: mol_type = other RNA
aggaacatatacatcaatactaaacaactaatcaacacaactacgccacc

SEQ ID NO: 8228 - RNA, 50 nt, synthetic construct
  source 1..50: mol_type = other RNA
aggatcataatactacaatactatacaactatcaatactatcacgccacc

SEQ ID NO: 8229 - RNA, 50 nt, synthetic construct
  source 1..50: mol_type = other RNA
aggaaacacaacaacacaactaacaacacaacacaactaaacaagccacc

SEQ ID NO: 8230 - RNA, 50 nt, synthetic construct
  source 1..50: mol_type = other RNA
aggaaatataataaatcataaataatcataataaataatcaatagccacc

SEQ ID NO: 8231 - RNA, 70 nt, synthetic construct
  source 1..70: mol_type = other RNA
aggtctaatatatcaaaataacatctaaaaacaacatatctaaattctaatatacacgtcgttcgccacc

SEQ ID NO: 8232 - RNA, 70 nt, synthetic construct
  source 1..70: mol_type = other RNA
aggactaataaatcaaaataacaactaaaaacaacataactaaatactaataaacacgtcgatcgccacc

SEQ ID NO: 8233 - RNA, 70 nt, synthetic construct
  source 1..70: mol_type = other RNA
aggactaataaatcaaaataacaactaaaaacaacataacaaaatacaaataaacacaacacaagccacc

SEQ ID NO: 8234 - RNA, 80 nt, synthetic construct
  source 1..80: mol_type = other RNA
aggactaataaatcaaaataacaactaaaaacaacataacaaaatacaaataaacacaacacaaccccggcgccgccacc

SEQ ID NO: 8235 - RNA, 70 nt, synthetic construct
  source 1..70: mol_type = other RNA
aggtcaacaatttcttatcattaaaacgctttatcctttattacccttttatttctcttaatctgccacc

SEQ ID NO: 8236 - RNA, 70 nt, synthetic construct
  source 1..70: mol_type = other RNA
aggacaacaataactctaataaacaaacgaattctattatatcaccacattatatctctaatctgccacc

SEQ ID NO: 8237 - RNA, 70 nt, synthetic construct
  source 1..70: mol_type = other RNA
aggacaacaataacatcacataacaaatacaaatctaacaacacacaaatataactctaaatcagccacc

SEQ ID NO: 8238 - RNA, 70 nt, synthetic construct
  source 1..70: mol_type = other RNA
aggaacaattacaaataacaattacaaaatcagcaaacacataaactcaagaccagattataaagccacc

SEQ ID NO: 8239 - RNA, 70 nt, synthetic construct
  source 1..70: mol_type = other RNA
aggaacaattacatataacaattacttaatcagcaaacatcattactctcgaccacatattaaagccacc

SEQ ID NO: 8240 - RNA, 70 nt, synthetic construct
  source 1..70: mol_type = other RNA
aggaacaatcacacataacaattacacaatcaccaaacacatcaacctacacaccaattataaagccacc

SEQ ID NO: 8241 - RNA, 70 nt, synthetic construct
  source 1..70: mol_type = other RNA
aggatcatcaaatcaacataaataaagaaaaaacaaagtcttacccgaaatcataattaaacacgccacc

SEQ ID NO: 8242 - RNA, 70 nt, synthetic construct
  source 1..70: mol_type = other RNA
aggatcatcaacaacataataatcaaataacaacaattcacatctcactttcataattaaacacgccacc

SEQ ID NO: 8243 - RNA, 70 nt, synthetic construct
  source 1..70: mol_type = other RNA
aggatcatcaaacacataataatcaaataacaacactactcacaaacacttacaaatcaaacacgccacc

SEQ ID NO: 8244 - RNA, 80 nt, synthetic construct
  source 1..80: mol_type = other RNA
aggatcatcaaacacataataatcaaataacaacactactcacaaacacttacaaatcaaacacccccggcgccgccacc

SEQ ID NO: 8245 - RNA, 70 nt, synthetic construct
  source 1..70: mol_type = other RNA
aggaccattacactatactatttactataattttcatatactaactatttcaatcttatcccgcgccacc

SEQ ID NO: 8246 - RNA, 70 nt, synthetic construct
  source 1..70: mol_type = other RNA
aggaccataacaacttacactatactataataatcaaatacttacaaactcaatcttatcacacgccacc

SEQ ID NO: 8247 - RNA, 70 nt, synthetic construct
  source 1..70: mol_type = other RNA
aggacaacaacaaacaacactaaactacaataatcaaatactaaaacacacaatcaaatcacacgccacc

SEQ ID NO: 8248 - RNA, 110 nt, synthetic construct
  source 1..110: mol_type = other RNA
gctggagcctcggtggcctagcttcttgccccttgggcctccccccagcccctcctccccttcctgcacccgtacccccgtggtctttgaataaagtctgagtgggcggc

SEQ ID NO: 8249 - RNA, 155 nt, synthetic construct
  source 1..155: mol_type = other RNA
tccataaagtaggaaacactacagctggagcctcggtggccatgcttcttgccccttgggcctccccccagcccctcctccccttcctgcacccgtaccccccgcattattactcacggtacgagtggtctttgaataaagtctgagtgggcggc

SEQ ID NO: 8250 - RNA, 295 nt, synthetic construct
  source 1..295: mol_type = other RNA
ctcgagctggtactgcatgcacgcaatgctagctgcccctttcccgtcctgggtaccccgagtctcccccgacctcgggtcccaggtatgctcccacctccacctgccccactcaccacctctgctagttccagacacctcccaagcacgcagcaatgcagctcaaaacgcttagcctagccacacccccacgggaaacagcagtgattaacctttagcaataaacgaaagtttaactaagctatactaaccccagggttggtcaatttcgtgccagccacaccctggagctagc

SEQ ID NO: 8251 - RNA, 122 nt, synthetic construct
  source 1..122: mol_type = other RNA
ttgtgtatgcgttaataaaaagaaggaactcgtaaaaactcaatgtatttctgaggaagcgtggtgcataatgccacgcagcgtctgcataacttttattatttcttttattaatcaacaaa

SEQ ID NO: 8252 - RNA, 34 nt, synthetic construct
  source 1..34: mol_type = other RNA
ttgtgtatgcgttaataaaaagaaggaactcgta

SEQ ID NO: 8253 - RNA, 93 nt, synthetic construct
  source 1..93: mol_type = other RNA
gctgccttctgcggggcttgccttctggccatgcccttcttctctcccttgcacctgtacctcttggtctttgaataaagcctgagtaggaag

SEQ ID NO: 8254 - RNA, 196 nt, synthetic construct
  source 1..196: mol_type = other RNA
gctagccatcacatttaaaagcatctcagcctaccatgagaataagagaaagaaaatgaagatcaatagcttattcatctctttttctttttcgttggtgtaaagccaacaccctgtctaaaaaacataaatttctttaatcattttgcctcttttctctgtgcttcaattaataaaaaatggaaagaacctcgag

SEQ ID NO: 8255 - DNA, 81 bp, synthetic construct
  source 1..81: mol_type = other DNA
agcggctcggagacgccgggcaccagcgagtcggcgacgccggagtcggtcagcgggtggaggctcttcaagaagatcagc

SEQ ID NO: 8256 - RNA, 105 nt, synthetic construct
  source 1..105: mol_type = other RNA
gctggagcctcggtggccatgcttcttgccccttgggcctccccccagcccctcctccccttcctgcacccgtacccccgtggtctttgaataaagtctgactag

SEQ ID NO: 8257 - protein, 2122 aa, synthetic construct
MPAAKRVKLDGGDKKYSIGLDIGTNSVGWAVITDEYKVPSKKFKVLGNTDRHSIKKNLIGALLFDSGETAEATRLKRTARRRYTRRKNRICYLQEIFSNEMAKVDDSFFHRLEESFLVEEDKKHERHPIFGNIVDEVAYHEKYPTIYHLRKKLVDSTDKADLRLIYLALAHMIKFRGHFLIEGDLNPDNSDVDKLFIQLVQTYNQLFEENPINASGVDAKAILSARLSKSRRLENLIAQLPGEKKNGLFGNLIALSLGLTPNFKSNFDLAEDAKLQLSKDTYDDDLDNLLAQIGDQYADLFLAAKNLSDAILLSDILRVNTEITKAPLSASMIKRYDEHHQDLTLLKALVRQQLPEKYKEIFFDQSKNGYAGYIDGGASQEEFYKFIKPILEKMDGTEELLVKLNREDLLRKQRTFDNGSIPHQIHLGELHAILRRQEDFYPFLKDNREKIEKILTFRIPYYVGPLARGNSRFAWMTRKSEETITPWNFEEVVDKGASAQSFIERMTNFDKNLPNEKVLPKHSLLYEYFTVYNELTKVKYVTEGMRKPAFLSGEQKKAIVDLLFKTNRKVTVKQLKEDYFKKIECFDSVEISGVEDRFNASLGTYHDLLKIIKDKDFLDNEENEDILEDIVLTLTLFEDREMIEERLKTYAHLFDDKVMKQLKRRRYTGWGRLSRKLINGIRDKQSGKTILDFLKSDGFANRNFMQLIHDDSLTFKEDIQKAQVSGQGDSLHEHIANLAGSPAIKKGILQTVKVVDELVKVMGRHKPENIVIEMARENQTTQKGQKNSRERMKRIEEGIKELGSQILKEHPVENTQLQNEKLYLYYLQNGRDMYVDQELDINRLSDYDVDHIVPQSFLKDDSIDNKVLTRSDKARGKSDNVPSEEVVKKMKNYWRQLLNAKLITQRKFDNLTKAERGGLSELDKAGFIKRQLVETRQITKHVAQILDSRMNTKYDENDKLIREVKVITLKSKLVSDFRKDFQFYKVREINNYHHAHDAYLNAVVGTALIKKYPKLESEFVYGDYKVYDVRKMIAKSEQEIGKATAKYFFYSNIMNFFKTEITLANGEIRKRPLIETNGETGEIVWDKGRDFATVRKVLSMPQVNIVKKTEVQTGGFSKESILPKRNSDKLIARKKDWDPKKYGGFDSPTVAYSVLVVAKVEKGKSKKLKSVKELLGITIMERSSFEKNPIDFLEAKGYKEVKKDLIIKLPKYSLFELENGRKRMLASAGELQKGNELALPSKYVNFLYLASHYEKLKGSPEDNEQKQLFVEQHKHYLDEIIEQISEFSKRVILADANLDKVLSAYNKHRDKPIREQAENIIHLFTLTNLGAPAAFKYFDTTIDRKRYTSTKEVLDATLIHQSITGLYETRIDLSQLGGDSGGSSGGSSGSETPGTSESATPESSGGSSGGSSTLNIEDEYRLHETSKEPDVSLGSTWLSDFPQAWAETGGMGLAVRQAPLIIPLKATSTPVSIKQYPMSQEARLGIKPHIQRLLDQGILVPCQSPWNTPLLPVKKPGTNDYRPVQDLREVNKRVEDIHPTVPNPYNLLSGLPPSHQWYTVLDLKDAFFCLRLHPTSQPLFAFEWRDPEMGISGQLTWTRLPQGFKNSPTLFNEALHRDLADFRIQHPDLILLQYVDDLLLAATSELDCQQGTRALLQTLGNLGYRASAKKAQICQKQVKYLGYLLKEGQRWLTEARKETVMGQPTPKTPRQLREFLGKAGFCRLFIPGFAEMAAPLYPLTKPGTLFNWGPDQQKAYQEIKQALLTAPALGLPDLTKPFELFVDEKQGYAKGVLTQKLGPWRRPVAYLSKKLDPVAAGWPPCLRMVAAIAVLTKDAGKLTMGQPLVILAPHAVEALVKQPPDRWLSNARMTHYQALLLDTDRVQFGPVVALNPATLLPLPEEGLQHNCLDILAEAHGTRPDLTDQPLPDADHTWYTDGSSLLQEGQRKAGAAVTTETEVIWAKALPAGTSAQRAELIALTQALKMAEGKKLNVYTDSRYAFATAHIHGEIYRRRGWLTSEGKEIKNKDEILALLKALFLPKRLSIIHCPGHQKGHSAEARGNRMADQAARKAAITETPDTSTLLIENSSPSGGSKRTADGSEFEKRTADGSEFESPKKKAKVE

SEQ ID NO: 8258 - RNA, 122 nt, synthetic construct
  source 1..122: mol_type = other RNA
gccgaagcactgcacgccgtgttttagagctagaaatagcaagttaaaataaggctagtccgttatcaacttgaaaaagtggcaccgagtcggtgcaccctgacgtacggcgtgcagtgctt

SEQ ID NO: 8259 - RNA, 47 nt, synthetic construct
  source 1..47: mol_type = other RNA
aggaaataagagagaaaagaagagtaagaagaaatataagagccacc

SEQ ID NO: 8260 - RNA, 48 nt, synthetic construct
  source 1..48: mol_type = other RNA
agggaaataagagagaaaagaagagtaagaagaaatataagagccacc

SEQ ID NO: 8261 - RNA, 58 nt, synthetic construct
  source 1..58: mol_type = other RNA
agggaaataagagagaaaagaagagtaagaagaaatataagaccccggcgccgccacc

SEQ ID NO: 8262 - RNA, 55 nt, synthetic construct
  source 1..55: mol_type = other RNA
agagaataaactagtattcttctggtccccacagactcagagagaacccgccacc

SEQ ID NO: 8263 - RNA, 71 nt, synthetic construct
  source 1..71: mol_type = other RNA
aggcaaaaatcaaaatcaatcatcatcacaacatcaacaatcaatcatcaacacatcatcaagacaccacc

SEQ ID NO: 8264 - RNA, 114 nt, synthetic construct
  source 1..114: mol_type = other RNA
gctggagcctcggtggcctagcttcttgccccttgggcctccccccagcccctcctccccttcctgcacccgtacccccgtggtctttgaataaagtctgagtgggcggcctag

SEQ ID NO: 8265 - RNA, 159 nt, synthetic construct
  source 1..159: mol_type = other RNA
tccataaagtaggaaacactacagctggagcctcggtggccatgcttcttgccccttgggcctccccccagcccctcctccccttcctgcacccgtaccccccgcattattactcacggtacgagtggtctttgaataaagtctgagtgggcggcctag

SEQ ID NO: 8266 - RNA, 299 nt, synthetic construct
  source 1..299: mol_type = other RNA
ctcgagctggtactgcatgcacgcaatgctagctgcccctttcccgtcctgggtaccccgagtctcccccgacctcgggtcccaggtatgctcccacctccacctgccccactcaccacctctgctagttccagacacctcccaagcacgcagcaatgcagctcaaaacgcttagcctagccacacccccacgggaaacagcagtgattaacctttagcaataaacgaaagtttaactaagctatactaaccccagggttggtcaatttcgtgccagccacaccctggagctagcctag

SEQ ID NO: 8267 - RNA, 126 nt, synthetic construct
  source 1..126: mol_type = other RNA
ttgtgtatgcgttaataaaaagaaggaactcgtaaaaactcaatgtatttctgaggaagcgtggtgcataatgccacgcagcgtctgcataacttttattatttcttttattaatcaacaaactag

SEQ ID NO: 8268 - RNA, 38 nt, synthetic construct
  source 1..38: mol_type = other RNA
ttgtgtatgcgttaataaaaagaaggaactcgtactag

SEQ ID NO: 8269 - RNA, 97 nt, synthetic construct
  source 1..97: mol_type = other RNA
gctgccttctgcggggcttgccttctggccatgcccttcttctctcccttgcacctgtacctcttggtctttgaataaagcctgagtaggaagctag

SEQ ID NO: 8270 - DNA, 33 bp, synthetic construct
  source 1..33: mol_type = other DNA
cccgccgccaagcgggtgaagctggacggcggc

SEQ ID NO: 8271 - protein, 11 aa, synthetic construct
PAAKRVKLDGG

SEQ ID NO: 8272 - DNA, 87 bp, synthetic construct
  source 1..87: mol_type = other DNA
aagcggaccgccgacggcagcgagttcgagaagcggaccgccgacggcagcgagttcgagagccccaagaagaaggccaaggtggag

SEQ ID NO: 8273 - protein, 29 aa, synthetic construct
KRTADGSEFEKRTADGSEFESPKKKAKVE

SEQ ID NO: 8274 - DNA, 138 bp, synthetic construct
  source 1..138: mol_type = other DNA
gccgaggccgccgccaaggaggccgccgccaaggaggccgccgccaaggaggccgccgccaaggccctggaggccgaggccgccgccaaggaggccgccgccaaggaggccgccgccaaggaggccgccgccaaggcc

SEQ ID NO: 8275 - protein, 46 aa, synthetic construct; identical to SEQ ID NO: 5217

SEQ ID NO: 8276 - DNA, 592 bp, synthetic construct
  source 1..592: mol_type = other DNA
aatcaacctctggattacaaaatttgtgaaagattgactgatattcttaactatgttgctccttttacgctgtgtggatatgctgctttaatgcctctgtatcatgctattgcttcccgtacggctttcgttttctcctccttgtataaatcctggttgctgtctctttatgaggagttgtggcccgttgtccgtcaacgtggcgtggtgtgctctgtgtttgctgacgcaacccccactggctggggcattgccaccacctgtcaactcctttctgggactttcgctttccccctcccgatcgccacggcagaactcatcgccgcctgccttgcccgctgctggacaggggctaggttgctgggcactgataattccgtggtgttgtcggggaagctgacgtcctttccatggctgctcgcctgtgttgccaactggatcctgcgcgggacgtccttctgctacgtcccttcggctctcaatccagcggacctcccttcccgaggccttctgccggttctgcggcctctcccgcgtcttcgctttcggcctccgacgagtcggatctccctttgggccgcctccccgcctg

SEQ ID NO: 8277 - protein, 9 aa, synthetic construct
PAAKRVKLD

SEQ ID NO: 8278 - protein, 19 aa, synthetic construct
KRTADGSEFESPKKKRKVE

SEQ ID NO: 8279 - RNA, 129 nt, synthetic construct
  source 1..129: mol_type = other RNA
aaaaaaaaaaaaaaaccaaaaaaaaaaaaaaaaaaaaaaaaacccaaaaaaaaaaaaaaaaaaaaaaaaaaaaaaaaaaccccaaaaaaaaaaaaaaaaaaaaaaaaaaaaaaaaaaaaaaaaaaaaaa

SEQ ID NO: 8280 - RNA, 129 nt, synthetic construct
  source 1..129: mol_type = other RNA
aaaaaaaaaaaaaaattaaaaaaaaaaaaaaaaaaaaaaaaatttaaaaaaaaaaaaaaaaaaaaaaaaaaaaaaaaaatttttaaaaaaaaaaaaaaaaaaaaaaaaaaaaaaaaaaaaaaaaaaaaa

SEQ ID NO: 8281 - RNA, 101 nt, synthetic construct
  source 1..101: mol_type = other RNA
gctggagcctcggtggccatgcttcttgccccttgggcctccccccagcccctcctccccttcctgcacccgtacccccgtggtctttgaataaagtctga

SEQ ID NO: 8282-8330 - skipped (49 entries)

SEQ ID NO: 8331 - protein, 1082 aa, synthetic construct
MAAFKPNPINYILGLDIGIASVGWAMVEIDEEENPIRLIDLGVRVFERAEVPKTGDSLAMARRLARSVRRLTRRRAHRLLRARRLLKREGVLQAADFDENGLIKSLPNTPWQLRAAALDRKLTPLEWSAVLLHLIKHRGYLSQRKNEGETADKELGALLKGVANNAHALQTGDFRTPAELALNKFEKESGHIRNQRGDYSHTFSRKDLQAELILLFEKQKEFGNPHVSGGLKEGIETLLMTQRPALSGDAVQKMLGHCTFEPAEPKAAKNTYTAERFIWLTKLNNLRILEQGSERPLTDTERATLMDEPYRKSKLTYAQARKLLGLEDTAFFKGLRYGKDNAEASTLMEMKAYHAISRALEKEGLKDKKSPLNLSSELQDEIGTAFSLFKTDEDITGRLKDRVQPEILEALLKHISFDKFVQISLKALRRIVPLMEQGKRYDEACAEIYGDHYGKKNTEEKIYLPPIPADEIRNPVVLRALSQARKVINGVVRRYGSPARIHIETAREVGKSFKDRKEIEKRQEENRKDREKAAAKFREYFPNFVGEPKSKDILKLRLYEQQHGKCLYSGKEINLVRLNEKGYVEIDHALPFSRTWDDSFNNKVLVLGSENQNKGNQTPYEYFNGKDNSREWQEFKARVETSRFPRSKKQRILLQKFDEDGFKECNLNDTRYVNRFLCQFVADHILLTGKGKRRVFASNGQITNLLRGFWGLRKVRAENDRHHALDAVVVACSTVAMQQKITRFVRYKEMNAFDGKTIDKETGKVLHQKTHFPQPWEFFAQEVMIRVFGKPDGKPEFEEADTPEKLRTLLAEKLSSRPEAVHEYVTPLFVSRAPNRKMSGAHKDTLRSAKRFVKHNEKISVKRVWLTEIKLADLENMVNYKNGREIELYEALKARLEAYGGNAKQAFDPKDNPFYKKGGQLVKAVRVEKTQESGVLLNKKNAYTIADNGDMVRVDVFCKVDKKGKNQYFIVPIYAWQVAENILPDIDCKGYRIDDSYTFCFSLHKYDLIAFQKDEKSKVEFAYYINCDSSNGRFYLAWHDKGSKEQQFRISTQNLVLIQKYQVNELGKEIRPCRLKKRPPVR

SEQ ID NO: 8332 - protein, 1055 aa, synthetic construct
MQNNPLNYILGLDLGIASIGWAVVEIDEESSPIRLIDVGVRTFERAEVAKTGESLALSRRLARSSRRLIKRRAERLKKAKRLLKAEKILHSIDEKLPINVWQLRVKGLKEKLERQEWAAVLLHLSKHRGYLSQRKNEGKSDNKELGALLSGIASNHQMLQSSEYRTPAEIAVKKFQVEEGHIRNQRGSYTHTFSRLDLLAEMELLFQRQAELGNSYTSTTLLENLTALLMWQKPALAGDAILKMLGKCTFEPSEYKAAKNSYSAERFVWLTKLNNLRILENGTERALNDNERFALLEQPYEKSKLTYAQVRAMLALSDNAIFKGVRYLGEDKKTVESKTTLIEMKFYHQIRKTLGSAELKKEWNELKGNSDLLDEIGTAFSLYKTDDDICRYLEGKLPERVLNALLENLNFDKFIQLSLKALHQILPLMLQGQRYDEAVSAIYGDHYGKKSTETTRLLPTIPADEIRNPVVLRTLTQARKVINAVVRLYGSPARIHIETAREVGKSYQDRKKLEKQQEDNRKQRESAVKKFKEMFPHFVGEPKGKDILKMRLYELQQAKCLYSGKSLELHRLLEKGYVEVDHALPFSRTWDDSFNNKVLVLANENQNKGNLTPYEWLDGKNNSERWQHFVVRVQTSGFSYAKKQRILNHKLDEKGFIERNLNDTRYVARFLCNFIADNMLLVGKGKRNVFASNGQITALLRHRWGLQKVREQNDRHHALDAVVVACSTVAMQQKITRFVRYNEGNVFSGERIDRETGEIIPLHFPSPWAFFKENVEIRIFSENPKLELENRLPDYPQYNHEWVQPLFVSRMPTRKMTGQGHMETVKSAKRLNEGLSVLKVPLTQLKLSDLERMVNRDREIALYESLKARLEQFGNDPAKAFAEPFYKKGGALVKAVRLEQTQKSGVLVRDGNGVADNASMVRVDVFTKGGKYFLVPIYTWQVAKGILPNRAATQGKDENDWDIMDEMATFQFSLCQNDLIKLVTKKKTIFGYFNGLNRATSNINIKEHDLDKSKGKLGIYLEVGVKLAISLEKYQVDELGKNIRPCRPTKRQHVR

SEQ ID NO: 8333 - protein, 1053 aa, synthetic construct
MKRNYILGLDIGITSVGYGIIDYETRDVIDAGVRLFKEANVENNEGRRSKRGARRLKRRRRHRIQRVKKLLFDYNLLTDHSELSGINPYEARVKGLSQKLSEEEFSAALLHLAKRRGVHNVNEVEEDTGNELSTKEQISRNSKALEEKYVAELQLERLKKDGEVRGSINRFKTSDYVKEAKQLLKVQKAYHQLDQSFIDTYIDLLETRRTYYEGPGEGSPFGWKDIKEWYEMLMGHCTYFPEELRSVKYAYNADLYNALNDLNNLVITRDENEKLEYYEKFQIIENVFKQKKKPTLKQIAKEILVNEEDIKGYRVTSTGKPEFTNLKVYHDIKDITARKEIIENAELLDQIAKILTIYQSSEDIQEELTNLNSELTQEEIEQISNLKGYTGTHNLSLKAINLILDELWHTNDNQIAIFNRLKLVPKKVDLSQQKEIPTTLVDDFILSPVVKRSFIQSIKVINAIIKKYGLPNDIIIELAREKNSKDAQKMINEMQKRNRQTNERIEEIIRTTGKENAKYLIEKIKLHDMQEGKCLYSLEAIPLEDLLNNPFNYEVDHIIPRSVSFDNSFNNKVLVKQEENSKKGNRTPFQYLSSSDSKISYETFKKHILNLAKGKGRISKTKKEYLLEERDINRFSVQKDFINRNLVDTRYATRGLMNLLRSYFRVNNLDVKVKSINGGFTSFLRRKWKFKKERNKGYKHHAEDALIIANADFIFKEWKKLDKAKKVMENQMFEEKQAESMPEIETEQEYKEIFITPHQIKHIKDFKDYKYSHRVDKKPNRELINDTLYSTRKDDKGNTLIVNNLNGLYDKDNDKLKKLINKSPEKLLMYHHDPQTYQKLKLIMEQYGDEKNPLYKYYEETGNYLTKYSKKDNGPVIKKIKYYGNKLNAHLDITDDYPNSRNKVVKLSLKPYRFDVYLDNGVYKFVTVKNLDVIKKENYYEVNSKCYEEAKKLKKISNQAEFIASFYNNDLIKINGELYRVIGVNNDLLNRIEVNMIDITYREYLENMNDKRPPRIIKTIASKTQSIKKYSTDILGNLYEVKSKKHPQIIKKG

SEQ ID NO: 8334 - protein, 1053 aa, synthetic construct
MKRNYILGLDIGITSVGYGIIDYETRDVIDAGVRLFKEANVENNEGRRSKRGARRLKRRRRHRIQRVKKLLFDYNLLTDHSELSGINPYEARVKGLSQKLSEEEFSAALLHLAKRRGVHNVNEVEEDTGNELSTKEQISRNSKALEEKYVAELQLERLKKDGEVRGSINRFKTSDYVKEAKQLLKVQKAYHQLDQSFIDTYIDLLETRRTYYEGPGEGSPFGWKDIKEWYEMLMGHCTYFPEELRSVKYAYNADLYNALNDLNNLVITRDENEKLEYYEKFQIIENVFKQKKKPTLKQIAKEILVNEEDIKGYRVTSTGKPEFTNLKVYHDIKDITARKEIIENAELLDQIAKILTIYQSSEDIQEELTNLNSELTQEEIEQISNLKGYTGTHNLSLKAINLILDELWHTNDNQIAIFNRLKLVPKKVDLSQQKEIPTTLVDDFILSPVVKRSFIQSIKVINAIIKKYGLPNDIIIELAREKNSKDAQKMINEMQKRNRQTNERIEEIIRTTGKENAKYLIEKIKLHDMQEGKCLYSLEAIPLEDLLNNPFNYEVDHIIPRSVSFDNSFNNKVLVKQEENSKKGNRTPFQYLSSSDSKISYETFKKHILNLAKGKGRISKTKKEYLLEERDINRFSVQKDFINRNLVDTRYATRGLMNLLRSYFRVNNLDVKVKSINGGFTSFLRRKWKFKKERNKGYKHHAEDALIIANADFIFKEWKKLDKAKKVMENQMFEEKQAESMPEIETEQEYKEIFITPHQIKHIKDFKDYKYSHRVDKKPNRKLINDTLYSTRKDDKGNTLIVNNLNGLYDKDNDKLKKLINKSPEKLLMYHHDPQTYQKLKLIMEQYGDEKNPLYKYYEETGNYLTKYSKKDNGPVIKKIKYYGNKLNAHLDITDDYPNSRNKVVKLSLKPYRFDVYLDNGVYKFVTVKNLDVIKKENYYEVNSKCYEEAKKLKKISNQAEFIASFYKNDLIKINGELYRVIGVNNDLLNRIEVNMIDITYREYLENMNDKRPPHIIKTIASKTQSIKKYSTDILGNLYEVKSKKHPQIIKKG

SEQ ID NO: 8335 - protein, 1061 aa, synthetic construct
MQENQQKQNYILGLDIGITSVGYGLIDSKTREVIDAGVRLFPEADSENNSNRRSKRGARRLKRRRIHRLNRVKDLLADYQMIDLNNVPKSTDPYTIRVKGLREPLTKEEFAIALLHIAKRRGLHNISVSMGDEEQDNELSTKQQLQKNAQQLQDKYVCELQLERLTNINKVRGEKNRFKTEDFVKEVKQLCETQRQYHNIDDQFIQQYIDLVSTRREYFEGPGNGSPYGWDGDLLKWYEKLMGRCTYFPEELRSVKYAYSADLFNALNDLNNLVVTRDDNPKLEYYEKYHIIENVFKQKKNPTLKQIAKEIGVQDYDIRGYRITKSGKPQFTSFKLYHDLKNIFEQAKYLEDVEMLDEIAKILTIYQDEISIKKALDQLPELLTESEKSQIAQLTGYTGTHRLSLKCIHIVIDELWESPENQMEIFTRLNLKPKKVEMSEIDSIPTTLVDEFILSPVVKRAFIQSIKVINAVINRFGLPEDIIIELAREKNSKDRRKFINKLQKQNEATRKKIEQLLAKYGNTNAKYMIEKIKLHDMQEGKCLYSLEAIPLEDLLSNPTHYEVDHIIPRSVSFDNSLNNKVLVKQSENSKKGNRTPYQYLSSNESKISYNQFKQHILNLSKAKDRISKKKRDMLLEERDINKFEVQKEFINRNLVDTRYATRELSNLLKTYFSTHDYAVKVKTINGGFTNHLRKVWDFKKHRNHGYKHHAEDALVIANADFLFKTHKALRRTDKILEQPGLEVNDTTVKVDTEEKYQELFETPKQVKNIKQFRDFKYSHRVDKKPNRQLINDTLYSTREIDGETYVVQTLKDLYAKDNEKVKKLFTERPQKILMYQHDPKTFEKLMTILNQYAEAKNPLAAYYEDKGEYVTKYAKKGNGPAIHKIKYIDKKLGSYLDVSNKYPETQNKLVKLSLKSFRFDIYKCEQGYKMVSIGYLDVLKKDNYYYIPKDKYEAEKQKKKIKESDLFVGSFYYNDLIMYEDELFRVIGVNSDINNLVELNMVDITYKDFCEVNNVTGEKRIKKTIGKRVVLIEKYTTDILGNLYKTPLPKKPQLIFKRGEL

SEQ ID NO: 8336 - protein, 1061 aa, synthetic construct
MQENQQKQNYILGLDIGITSVGYGLIDSKTREVIDAGVRLFPEADSENNSNRRSKRGARRLKRRRIHRLNRVKDLLADYQMIDLNNVPKSTDPYTIRVKGLREPLTKEEFAIALLHIAKRRGLHNISVSMGDEEQDNELSTKQQLQKNAQQLQDKYVCELQLERLTNINKVRGEKNRFKTEDFVKEVKQLCETQRQYHNIDDQFIQQYIDLVSTRREYFEGPGNGSPYGWDGDLLKWYEKLMGRCTYFPEELRSVKYAYSADLFNALNDLNNLVVTRDDNPKLEYYEKYHIIENVFKQKKNPTLKQIAKEIGVQDYDIRGYRITKSGKPQFTSFKLYHDLKNIFEQAKYLEDVEMLDEIAKILTIYQDEISIKKALDQLPELLTESEKSQIAQLTGYTGTHRLSLKCIHIVIDELWESPENQMEIFTRLNLKPKKVEMSEIDSIPTTLVDEFILSPVVKRAFIQSIKVINAVINRFGLPEDIIIELAREKNSKDRRKFINKLQKQNEATRKKIEQLLAKYGNTNAKYMIEKIKLHDMQEGKCLYSLEAIPLEDLLSNPTHYEVDHIIPRSVSFDNSLNNKVLVKQSENSKKGNRTPYQYLSSNESKISYNQFKQHILNLSKAKDRISKKKRDMLLEERDINKFEVQKEFINRNLVDTRYATRELSNLLKTYFSTHDYAVKVKTINGGFTNHLRKVWDFKKHRNHGYKHHAEDALVIANADFLFKTHKALRRTDKILEQPGLEVNDTTVKVDTEEKYQELFETPKQVKNIKQFRDFKYSHRVDKKPNRKLINDTLYSTREIDGETYVVQTLKDLYAKDNEKVKKLFTERPQKILMYQHDPKTFEKLMTILNQYAEAKNPLAAYYEDKGEYVTKYAKKGNGPAIHKIKYIDKKLGSYLDVSNKYPETQNKLVKLSLKSFRFDIYKCEQGYKMVSIGYLDVLKKDNYYYIPKDKYEAEKQKKKIKESDLFVGSFYKNDLIMYEDELFRVIGVNSDINNLVELNMVDITYKDFCEVNNVTGEKHIKKTIGKRVVLIEKYTTDILGNLYKTPLPKKPQLIFKRGEL

SEQ ID NO: 8337 - protein, 1375 aa, synthetic construct
MEKKYSIGLDIGTNSVGWAVITDDYKVPSKKFKVLGNTNRKSIKKNLMGALLFDSGETAEATRLKRTARRRYTRRKNRIRYLQEIFANEMAKLDDSFFQRLEESFLVEEDKKNERHPIFGNLADEVAYHRNYPTIYHLRKKLADSPEKADLRLIYLALAHIIKFRGHFLIEGKLNAENSDVAKLFYQLIQTYNQLFEESPLDEIEVDAKGILSARLSKSKRLEKLIAVFPNEKKNGLFGNIIALALGLTPNFKSNFDLTEDAKLQLSKDTYDDDLDELLGQIGDQYADLFSAAKNLSDAILLSDILRSNSEVTKAPLSASMVKRYDEHHQDLALLKTLVRQQFPEKYAEIFKDDTKNGYAGYVGADKKLRKRSGKLATEEEFYKFIKPILEKMDGAEELLAKLNRDDLLRKQRTFDNGSIPHQIHLKELHAILRRQEEFYPFLKENREKIEKILTFRIPYYVGPLARGNSRFAWLTRKSEEAITPWNFEEVVDKGASAQSFIERMTNFDEQLPNKKVLPKHSLLYEYFTVYNELTKVKYVTERMRKPEFLSGEQKKAIVDLLFKTNRKVTVKQLKEDYFKKIECFDSVEIIGVEDRFNASLGTYHDLLKIIKDKDFLDNEENEDILEDIVLTLTLFEDREMIEERLKTYAHLFDDKVMKQLKRRHYTGWGRLSRKMINGIRDKQSGKTILDFLKSDGFSNRNFMQLIHDDSLTFKEEIEKAQVSGQGDSLHEQIADLAGSPAIKKGILQTVKIVDELVKVMGHKPENIVIEMARENQTTTKGLQQSRERKKRIEEGIKELESQILKENPVENTQLQNEKLYLYYLQNGRDMYVDQELDINRLSDYDVDHIVPQSFIKDDSIDNKVLTRSVENRGKSDNVPSEEVVKKMKNYWRQLLNAKLITQRKFDNLTKAERGGLSEADKAGFIKRQLVETRQITKHVARILDSRMNTKRDKNDKPIREVKVITLKSKLVSDFRKDFQLYKVRDINNYHHAHDAYLNAVVGTALIKKYPKLESEFVYGDYKVYDVRKMIAKSEQEIGKATAKRFFYSNIMNFFKTEVKLANGEIRKRPLIETNGETGEVVWNKEKDFATVRKVLAMPQVNIVKKTEVQTGGFSKESILSKRESAKLIPRKKGWDTRKYGGFGSPTVAYSILVVAKVEKGKAKKLKSVKVLVGITIMEKGSYEKDPIGFLEAKGYKDIKKELIFKLPKYSLFELENGRRRMLASAKELQKANELVLPQHLVRLLYYTQNISATTGSNNLGYIEQHREEFKEIFEKIIDFSEKYILKNKVNSNLKSSFDEQFAVSDSILLSNSFVSLLKYTSFGASGGFTFLDLDVKQGRLRYQTVTEVLDATLIYQSITGLYETRTDLSQLGGD

SEQ ID NO: 8338 - protein, 1368 aa, synthetic construct [sequence omitted]

SEQ ID NO: 8339 - protein, 1368 aa, synthetic construct
MDKKYSIGLDIGTNSVGWAVITDEYKVPSKKFKVLGNTDRHSIKKNLIGALLFDSGETAEATRLKRTARRRYTRRKNRICYLQEIFSNEMAKVDDSFFHRLEESFLVEEDKKHERHPIFGNIVDEVAYHEKYPTIYHLRKKLVDSTDKADLRLIYLALAHMIKFRGHFLIEGDLNPDNSDVDKLFIQLVQTYNQLFEENPINASGVDAKAILSARLSKSRRLENLIAQLPGEKKNGLFGNLIALSLGLTPNFKSNFDLAEDAKLQLSKDTYDDDLDNLLAQIGDQYADLFLAAKNLSDAILLSDILRVNTEITKAPLSASMIKRYDEHHQDLTLLKALVRQQLPEKYKEIFFDQSKNGYAGYIDGGASQEEFYKFIKPILEKMDGTEELLVKLNREDLLRKQRTFDNGSIPHQIHLGELHAILRRQEDFYPFLKDNREKIEKILTFRIPYYVGPLARGNSRFAWMTRKSEETITPWNFEEVVDKGASAQSFIERMTNFDKNLPNEKVLPKHSLLYEYFTVYNELTKVKYVTEGMRKPAFLSGEQKKAIVDLLFKTNRKVTVKQLKEDYFKKIECFDSVEISGVEDRFNASLGTYHDLLKIIKDKDFLDNEENEDILEDIVLTLTLFEDREMIEERLKTYAHLFDDKVMKQLKRRRYTGWGRLSRKLINGIRDKQSGKTILDFLKSDGFANRNFMQLIHDDSLTFKEDIQKAQVSGQGDSLHEHIANLAGSPAIKKGILQTVKVVDELVKVMGRHKPENIVIEMARENQTTQKGQKNSRERMKRIEEGIKELGSQILKEHPVENTQLQNEKLYLYYLQNGRDMYVDQELDINRLSDYDVDHIVPQSFLKDDSIDNKVLTRSDKNRGKSDNVPSEEVVKKMKNYWRQLLNAKLITQRKFDNLTKAERGGLSELDKAGFIKRQLVETRQITKHVAQILDSRMNTKYDENDKLIREVKVITLKSKLVSDFRKDFQFYKVREINNYHHAHDAYLNAVVGTALIKKYPKLESEFVYGDYKVYDVRKMIAKSEQEIGKATAKYFFYSNIMNFFKTEITLANGEIRKRPLIETNGETGEIVWDKGRDFATVRKVLSMPQVNIVKKTEVQTGGFSKESIRPKRNSDKLIARKKDWDPKKYGGFVSPTVAYSVLVVAKVEKGKSKKLKSVKELLGITIMERSSFEKNPIDFLEAKGYKEVKKDLIIKLPKYSLFELENGRKRMLASARFLQKGNELALPSKYVNFLYLASHYEKLKGSPEDNEQKQLFVEQHKHYLDEIIEQISEFSKRVILADANLDKVLSAYNKHRDKPIREQAENIIHLFTLTNLGAPRAFKYFDTTIDRKVYRSTKEVLDATLIHQSITGLYETRIDLSQLGGD

SEQ ID NO: 8340 - protein, 1368 aa, synthetic construct
MDKKYSIGLDIGTNSVGWAVITDEYKVPSKKFKVLGNTDRHSIKKNLIGALLFDSGETAERTRLKRTARRRYTRRKNRICYLQEIFSNEMAKVDDSFFHRLEESFLVEEDKKHERHPIFGNIVDEVAYHEKYPTIYHLRKKLVDSTDKADLRLIYLALAHMIKFRGHFLIEGDLNPDNSDVDKLFIQLVQTYNQLFEENPINASGVDAKAILSARLSKSRRLENLIAQLPGEKKNGLFGNLIALSLGLTPNFKSNFDLAEDAKLQLSKDTYDDDLDNLLAQIGDQYADLFLAAKNLSDAILLSDILRVNTEITKAPLSASMIKRYDEHHQDLTLLKALVRQQLPEKYKEIFFDQSKNGYAGYIDGGASQEEFYKFIKPILEKMDGTEELLVKLNREDLLRKQRTFDNGSIPHQIHLGELHAILRRQEDFYPFLKDNREKIEKILTFRIPYYVGPLARGNSRFAWMTRKSEETITPWNFEEVVDKGASAQSFIERMTNFDKNLPNEKVLPKHSLLYEYFTVYNELTKVKYVTEGMRKPAFLSGEQKKAIVDLLFKTNRKVTVKQLKEDYFKKIECFDSVEISGVEDRFNASLGTYHDLLKIIKDKDFLDNEENEDILEDIVLTLTLFEDREMIEERLKTYAHLFDDKVMKQLKRRRYTGWGRLSRKLINGIRDKQSGKTILDFLKSDGFANRNFMQLIHDDSLTFKEDIQKAQVSGQGDSLHEHIANLAGSPAIKKGILQTVKVVDELVKVMGRHKPENIVIEMARENQTTQKGQKNSRERMKRIEEGIKELGSQILKEHPVENTQLQNEKLYLYYLQNGRDMYVDQELDINRLSDYDVDHIVPQSFLKDDSIDNKVLTRSDKNRGKSDNVPSEEVVKKMKNYWRQLLNAKLITQRKFDNLTKAERGGLSELDKAGFIKRQLVETRQITKHVAQILDSRMNTKYDENDKLIREVKVITLKSKLVSDFRKDFQFYKVREINNYHHAHDAYLNAVVGTALIKKYPKLESEFVYGDYKVYDVRKMIAKSEQEIGKATAKYFFYSNIMNFFKTEITLANGEIRKRPLIETNGETGEIVWDKGRDFATVRKVLSMPQVNIVKKTEVQTGGFSKESIRPKRNSDKLIARKKDWDPKKYGGFLWPTVAYSVLVVAKVEKGKSKKLKSVKELLGITIMERSSFEKNPIDFLEAKGYKEVKKDLIIKLPKYSLFELENGRKRMLASAKQLQKGNELALPSKYVNFLYLASHYEKLKGSPEDNEQKQLFVEQHKHYLDEIIEQISEFSKRVILADANLDKVLSAYNKHRDKPIREQAENIIHLFTLTRLGAPRAFKYFDTTIDPKQYRSTKEVLDATLIHQSITGLYETRIDLSQLGGD

SEQ ID NO: 8341 - protein, 1121 aa, synthetic construct
MSDLVLGLDIGIGSVGVGILNKVTGEIIHKNSRIFPAAQAENNLVRRTNRQGRRLARRKKHRRVRLNRLFEESGLITDFTKISINLNPYQLRVKGLTDELSNEELFIALKNMVKHRGISYLDDASDDGNSSVGDYAQIVKENSKQLETKTPGQIQLERYQTYGQLRGDFTVEKDGKKHRLINVFPTSAYRSEALRILQTQQEFNPQITDEFINRYLEILTGKRKYYHGPGNEKSRTDYGRYRTSGETLDNIFGILIGKCTFYPDEFRAAKASYTAQEFNLLNDLNNLTVPTETKKLSKEQKNQIINYVKNEKAMGPAKLFKYIAKLLSCDVADIKGYRIDKSGKAEIHTFEAYRKMKTLETLDIEQMDRETLDKLAYVLTLNTEREGIQEALEHEFADGSFSQKQVDELVQFRKANSSIFGKGWHNFSVKLMMELIPELYETSEEQMTILTRLGKQKTTSSSNKTKYIDEKLLTEEIYNPVVAKSVRQAIKIVNAAIKEYGDFDNIVIEMARETNEDDEKKAIQKIQKANKDEKDAAMLKAANQYNGKAELPHSVFHGHKQLATKIRLWHQQGERCLYTGKTISIHDLINNSNQFEVDHILPLSITFDDSLANKVLVYATANQEKGQRTPYQALDSMDDAWSFRELKAFVRESKTLSNKKKEYLLTEEDISKFDVRKKFIERNLVDTRYASRVVLNALQEHFRAHKIDTKVSVVRGQFTSQLRRHWGIEKTRDTYHHHAVDALIIAASSQLNLWKKQKNTLVSYSEDQLLDIETGELISDDEYKESVFKAPYQHFVDTLKSKEFEDSILFSYQVDSKFNRKISDATIYATRQAKVGKDKADETYVLGKIKDIYTQDGYDAFMKIYKKDKSKFLMYRHDPQTFEKVIEPILENYPNKQINEKGKEVPCNPFLKYKEEHGYIRKYSKKGNGPEIKSLKYYDSKLGNHIDITPKDSNNKVVLQSVSPWRADVYFNKTTGKYEILGLKYADLQFEKGTGTYKISQEKYNDIKKKEGVDSDSEFKFTLYKNDLLLVKDTETKEQQLFRFLSRTMPKQKHYVELKPYDKQKFEGGEALIKVLGNVANSGQCKKGLGKSNISIYKVRTDVLGNQHIIKNEGDKPKLDF

SEQ ID NO: 8342 - protein, 1092 aa, synthetic construct
MAYTMGIDVGIASCGWAIVDLERQRIIDIGVRTFEKAENPKNGEALAVPRREARSSRRRLRRKKHRIERLKHMFVRNGLAVDIQHLEQTLRSQNEIDVWQLRVDGLDRMLTQKEWLRVLIHLAQRRGFQSNRKTDGSSEDGQVLVNVTENDRLMEEKDYRTVAEMMVKDEKFSDHKRNKNGNYHGVVSRSSLLVEIHTLFETQRQHHNSLASKDFELEYVNIWSAQRPVATKDQIEKMIGTCTFLPKEKRAPKASWHFQYFMLLQTINHIRITNVQGTRSLNKEEIEQVVNMALTKSKVSYHDTRKILDLSEEYQFVGLDYGKEDEKKKVESKETIIKLDDYHKLNKIFNEVELAKGETWEADDYDTVAYALTFFKDDEDIRDYLQNKYKDSKNRLVKNLANKEYTNELIGKVSTLSFRKVGHLSLKALRKIIPFLEQGMTYDKACQAAGFDFQGISKKKRSVVLPVIDQISNPVVNRALTQTRKVINALIKKYGSPETIHIETARELSKTFDERKNITKDYKENRDKNEHAKKHLSELGIINPTGLDIVKYKLWCEQQGRCMYSNQPISFERLKESGYTEVDHIIPYSRSMNDSYNNRVLVMTRENREKGNQTPFEYMGNDTQRWYEFEQRVTTNPQIKKEKRQNLLLKGFTNRRELEMLERNLNDTRYITKYLSHFISTNLEFSPSDKKKKVVNTSGRITSHLRSRWGLEKNRGQNDLHHAMDAIVIAVTSDSFIQQVTNYYKRKERRELNGDDKFPLPWKFFREEVIARLSPNPKEQIEALPNHFYSEDELADLQPIFVSRMPKRSITGEAHQAQFRRVVGKTKEGKNITAKKTALVDISYDKNGDFNMYGRETDPATYEAIKERYLEFGGNVKKAFSTDLHKPKKDGTKGPLIKSVRIMENKTLVHPVNKGKGVVYNSSIVRTDVFQRKEKYYLLPVYVTDVTKGKLPNKVIVAKKGYHDWIEVDDSFTFLFSLYPNDLIFIRQNPKKKISLKKRIESHSISDSKEVQEIHAYYKGVDSSTAAIEFIIHDGSYYAKGVGVQNLDCFEKYQVDILGNYFKVKGEKRLELETSDSNHKGKDVNSIKSTSR

SEQ ID NO: 8343 - protein, 1053 aa, synthetic construct
MKRNYILGLDIGITSVGYGIIDYETRDVIDAGVRLFKEANVENNEGRRSKRGARRLKRRRRHRIQRVKKLLFDYNLLTDHSELSGINPYEARVKGLSQKLSEEEFSAALLHLAKRRGVHNVNEVEEDTGNELSTKEQISRNSKALEEKYVAELQLERLKKDGEVRGSINRFKTSDYVKEAKQLLKVQKAYHQLDQSFIDTYIDLLETRRTYYEGPGEGSPFGWKDIKEWYEMLMGHCTYFPEELRSVKYAYNADLYNALNDLNNLVITRDENEKLEYYEKFQIIENVFKQKKKPTLKQIAKEILVNEEDIKGYRVTSTGKPEFTNLKVYHDIKDITARKEIIENAELLDQIAKILTIYQSSEDIQEELTNLNSELTQEEIEQISNLKGYTGTHNLSLKAINLILDELWHTNDNQIAIFNRLKLVPKKVDLSQQKEIPTTLVDDFILSPVVKRSFIQSIKVINAIIKKYGLPNDIIIELAREKNSKDAQKMINEMQKRNRQTNERIEEIIRTTGKENAKYLIEKIKLHDMQEGKCLYSLEAIPLEDLLNNPFNYEVDHIIPRSVSFDNSFNNKVLVKQEENSKKGNRTPFQYLSSSDSKISYETFKKHILNLAKGKGRISKTKKEYLLEERDINRFSVQKDFINRNLVDTRYATRGLMNLLRSYFRVNNLDVKVKSINGGFTSFLRRKWKFKKERNKGYKHHAEDALIIANADFIFKEWKKLDKAKKVMENQMFEEKQAESMPEIETEQEYKEIFITPHQIKHIKDFKDYKYSHRVDKKPNRKLINDTLYSTRKDDKGNTLIVNNLNGLYDKDNDKLKKLINKSPEKLLMYHHDPQTYQKLKLIMEQYGDEKNPLYKYYEETGNYLTKYSKKDNGPVIKKIKYYGNKLNAHLDITDDYPNSRNKVVKLSLKPYRFDVYLDNGVYKFVTVKNLDVIKKENYYEVNSKCYEEAKKLKKISNQAEFIASFYKNDLIKINGELYRVIGVNSDKNNLIEVNMIDITYREYLENMNDKRPPHIIKTIASKTQSIKKYSTDILGNLYEVKSKKHPQIIKKG

SEQ ID NO: 8344 - protein, 1053 aa, synthetic construct
MKRNYILGLDIGITSVGYGIIDYETRDVIDAGVRLFKEANVENNEGRRSKRGARRLKRRRRHRIQRVKKLLFDYNLLTDHSELSGINPYEARVKGLSQKLSEEEFSAALLHLAKRRGVHNVNEVEEDTGNELSTKEQISRNSKALEEKYVAELQLERLKKDGEVRGSINRFKTSDYVKEAKQLLKVQKAYHQLDQSFIDTYIDLLETRRTYYEGPGEGSPFGWKDIKEWYEMLMGHCTYFPEELRSVKYAYNADLYNALNDLNNLVITRDENEKLEYYEKFQIIENVFKQKKKPTLKQIAKEILVNEEDIKGYRVTSTGKPEFTNLKVYHDIKDITARKEIIENAELLDQIAKILTIYQSSEDIQEELTNLNSELTQEEIEQISNLKGYTGTHNLSLKAINLILDELWHTNDNQIAIFNRLKLVPKKVDLSQQKEIPTTLVDDFILSPVVKRSFIQSIKVINAIIKKYGLPNDIIIELAREKNSKDAQKMINEMQKRNRQTNERIEEIIRTTGKENAKYLIEKIKLHDMQEGKCLYSLEAIPLEDLLNNPFNYEVDHIIPRSVSFDNSFNNKVLVKQEENSKKGNRTPFQYLSSSDSKISYETFKKHILNLAKGKGRISKTKKEYLLEERDINRFSVQKDFINRNLVDTRYATRGLMNLLRSYFRVNNLDVKVKSINGGFTSFLRRKWKFKKERNKGYKHHAEDALIIANADFIFKEWKKLDKAKKVMENQMFEEKQAESMPEIETEQEYKEIFITPHQIKHIKDFKDYKYSHRVDKKPNRKLINDTLYSTRKDDKGNTLIVNNLNGLYDKDNDKLKKLINKSPEKLLMYHHDPQTYQKLKLIMEQYGDEKNPLYKYYEETGNYLTKYSKKDNGPVIKKIKYYGNKLNAHLDITDDYPNSRNKVVKLSLKPYRFDVYLDNGVYKFVTVKNLDVIKKENYYEVNSKCYEEAKKLKKISNQAEFIASFYKNDLIKINGELYRVIGVNNSTRNIVELNMIDITYREYLENMNDKRPPHIIKTIASKTQSIKKYSTDILGNLYEVKSKKHPQIIKKG

SEQ ID NO: 8345 - protein, 1053 aa, synthetic construct
MKRNYILGLDIGITSVGYGIIDYETRDVIDAGVRLFKEANVENNEGRRSKRGARRLKRRRRHRIQRVKKLLFDYNLLTDHSELSGINPYEARVKGLSQKLSEEEFSAALLHLAKRRGVHNVNEVEEDTGNELSTKEQISRNSKALEEKYVAELQLERLKKDGEVRGSINRFKTSDYVKEAKQLLKVQKAYHQLDQSFIDTYIDLLETRRTYYEGPGEGSPFGWKDIKEWYEMLMGHCTYFPEELRSVKYAYNADLYNALNDLNNLVITRDENEKLEYYEKFQIIENVFKQKKKPTLKQIAKEILVNEEDIKGYRVTSTGKPEFTNLKVYHDIKDITARKEIIENAELLDQIAKILTIYQSSEDIQEELTNLNSELTQEEIEQISNLKGYTGTHNLSLKAINLILDELWHTNDNQIAIFNRLKLVPKKVDLSQQKEIPTTLVDDFILSPVVKRSFIQSIKVINAIIKKYGLPNDIIIELAREKNSKDAQKMINEMQKRNRQTNERIEEIIRTTGKENAKYLIEKIKLHDMQEGKCLYSLEAIPLEDLLNNPFNYEVDHIIPRSVSFDNSFNNKVLVKQEENSKKGNRTPFQYLSSSDSKISYETFKKHILNLAKGKGRISKTKKEYLLEERDINRFSVQKDFINRNLVDTRYATRGLMNLLRSYFRVNNLDVKVKSINGGFTSFLRRKWKFKKERNKGYKHHAEDALIIANADFIFKEWKKLDKAKKVMENQMFEEKQAESMPEIETEQEYKEIFITPHQIKHIKDFKDYKYSHRVDKKPNRKLINDTLYSTRKDDKGNTLIVNNLNGLYDKDNDKLKKLINKSPEKLLMYHHDPQTYQKLKLIMEQYGDEKNPLYKYYEETGNYLTKYSKKDNGPVIKKIKYYGNKLNAHLDITDDYPNSRNKVVKLSLKPYRFDVYLDNGVYKFVTVKNLDVIKKENYYEVNSKCYEEAKKLKKISNQAEFIASFYKNDLIKINGELYRVIGVNSDDRNIIELNMIDITYREYLENMNDKRPPHIIKTIASKTQSIKKYSTDILGNLYEVKSKKHPQIIKKG

SEQ ID NO: 8346 - protein, 1053 aa, synthetic construct
MKRNYILGLDIGITSVGYGIIDYETRDVIDAGVRLFKEANVENNEGRRSKRGARRLKRRRRHRIQRVKKLLFDYNLLTDHSELSGINPYEARVKGLSQKLSEEEFSAALLHLAKRRGVHNVNEVEEDTGNELSTKEQISRNSKALEEKYVAELQLERLKKDGEVRGSINRFKTSDYVKEAKQLLKVQKAYHQLDQSFIDTYIDLLETRRTYYEGPGEGSPFGWKDIKEWYEMLMGHCTYFPEELRSVKYAYNADLYNALNDLNNLVITRDENEKLEYYEKFQIIENVFKQKKKPTLKQIAKEILVNEEDIKGYRVTSTGKPEFTNLKVYHDIKDITARKEIIENAELLDQIAKILTIYQSSEDIQEELTNLNSELTQEEIEQISNLKGYTGTHNLSLKAINLILDELWHTNDNQIAIFNRLKLVPKKVDLSQQKEIPTTLVDDFILSPVVKRSFIQSIKVINAIIKKYGLPNDIIIELAREKNSKDAQKMINEMQKRNRQTNERIEEIIRTTGKENAKYLIEKIKLHDMQEGKCLYSLEAIPLEDLLNNPFNYEVDHIIPRSVSFDNSFNNKVLVKQEENSKKGNRTPFQYLSSSDSKISYETFKKHILNLAKGKGRISKTKKEYLLEERDINRFSVQKDFINRNLVDTRYATRGLMNLLRSYFRVNNLDVKVKSINGGFTSFLRRKWKFKKERNKGYKHHAEDALIIANADFIFKEWKKLDKAKKVMENQMFEEKQAESMPEIETEQEYKEIFITPHQIKHIKDFKDYKYSHRVDKKPNRKLINDTLYSTRKDDKGNTLIVNNLNGLYDKDNDKLKKLINKSPEKLLMYHHDPQTYQKLKLIMEQYGDEKNPLYKYYEETGNYLTKYSKKDNGPVIKKIKYYGNKLNAHLDITDDYPNSRNKVVKLSLKPYRFDVYLDNGVYKFVTVKNLDVIKKENYYEVNSKCYEEAKKLKKISNQAEFIASFYKNDLIKINGELYRVIGVNNNRLNKIELNMIDITYREYLENMNDKRPPHIIKTIASKTQSIKKYSTDILGNLYEVKSKKHPQIIKKG

SEQ ID NO: 8347 - protein, 1084 aa, synthetic construct
MKYHVGIDVGTFSVGLAAIEVDDAGMPIKTLSLVSHIHDSGLDPDEIKSAVTRLASSGIARRTRRLYRRKRRRLQQLDKFIQRQGWPVIELEDYSDPLYPWKVRAELAASYIADEKERGEKLSVALRHIARHRGWRNPYAKVSSLYLPDGPSDAFKAIREEIKRASGQPVPETATVGQMVTLCELGTLKLRGEGGVLSARLQQSDYAREIQEICRMQEIGQELYRKIIDVVFAAESPKGSASSRVGKDPLQPGKNRALKASDAFQRYRIAALIGNLRVRVDGEKRILSVEEKNLVFDHLVNLTPKKEPEWVTIAEILGIDRGQLIGTATMTDDGERAGARPPTHDTNRSIVNSRIAPLVDWWKTASALEQHAMVKALSNAEVDDFDSPEGAKVQAFFADLDDDVHAKLDSLHLPVGRAAYSEDTLVRLTRRMLSDGVDLYTARLQEFGIEPSWTPPTPRIGEPVGNPAVDRVLKTVSRWLESATKTWGAPERVIIEHVREGFVTEKRAREMDGDMRRRAARNAKLFQEMQEKLNVQGKPSRADLWRYQSVQRQNCQCAYCGSPITFSNSEMDHIVPRAGQGSTNTRENLVAVCHRCNQSKGNTPFAIWAKNTSIEGVSVKEAVERTRHWVTDTGMRSTDFKKFTKAVVERFQRATMDEEIDARSMESVAWMANELRSRVAQHFASHGTTVRVYRGSLTAEARRASGISGKLKFFDGVGKSRLDRRHHAIDAAVIAFTSDYVAETLAVRSNLKQSQAHRQEAPQWREFTGKDAEHRAAWRVWCQKMEKLSALLTEDLRDDRVVVMSNVRLRLGNGSAHKETIGKLSKVKLSSQLSVSDIDKASSEALWCALTREPGFDPKEGLPANPERHIRVNGTHVYAGDNIGLFPVSAGSIALRGGYAELGSSFHHARVYKITSGKKPAFAMLRVYTIDLLPYRNQDLFSVELKPQTMSMRQAEKKLRDALATGNAEYLGWLVVDDELVVDTSKIATDQVKAVEAELGTIRRWRVDGFFSPSKLRLRPLQMSKEGIKKESAPELSKIIDRPGWLPAVNKLFSDGNVTVVRRDSLGRVRLESTAHLPVTWKVQ

SEQ ID NO: 8348 - protein, 984 aa, synthetic construct
MARILAFDIGISSIGWAFSENDELKDCGVRIFTKVENPKTGESLALPRRLARSARKRLARRKARLNHLKHLIANEFKLNYEDYQSFDESLAKAYKGSLISPYELRFRALNELLSKQDFARVILHIAKRRGYDDIKNSDDKEKGAILKAIKQNEEKLANYQSVGEYLYKEYFQKFKENSKEFTNVRNKKESYERCIAQSFLKDELKLIFKKQREFGFSFSKKFEEEVLSVAFYKRALKDFSHLVGNCSFFTDEKRAPKNSPLAFMFVALTRIINLLNNLKNTEGILYTKDDLNALLNEVLKNGTLTYKQTKKLLGLSDDYEFKGEKGTYFIEFKKYKEFIKALGEHNLSQDDLNEIAKDITLIKDEIKLKKALAKYDLNQNQIDSLSKLEFKDHLNISFKALKLVTPLMLEGKKYDEACNELNLKVAINEDKKDFLPAFNETYYKDEVTNPVVLRAIKEYRKVLNALLKKYGKVHKINIELAREVGKNHSQRAKIEKEQNENYKAKKDAELECEKLGLKINSKNILKLRLFKEQKEFCAYSGEKIKISDLQDEKMLEIDHIYPYSRSFDDSYMNKVLVFTKQNQEKLNQTPFEAFGNDSAKWQKIEVLAKNLPTKKQKRILDKNYKDKEQKNFKDRNLNDTRYIARLVLNYTKDYLDFLPLSDDENTKLNDTQKGSKVHVEAKSGMLTSALRHTWGFSAKDRNNHLHHAIDAVIIAYANNSIVKAFSDFKKEQESNSAELYAKKISELDYKNKRKFFEPFSGFRQKVLDKIDEIFVSKPERKKPSGALHEETFRKEEEFYQSYGGKEGVLKALELGKIRKVNGKIVKNGDMFRVDIFKHKKTNKFYAVPIYTMDFALKVLPNKAVARSKKGEIKDWILMDENYEFCFSLYKDSLILIQTKDMQEPEFVYYNAFTSSTVSLIVSKHDNKFETLSKNQKILFKNANEKEVIAKSIGIQNLKVFEKYIVSALGEVTKAEFRQREDFKK

SEQ ID NO: 8349 - protein, 1087 aa, synthetic construct
MRYKIGLDIGITSVGWAVMNLDIPRIEDLGVRIFDRAENPQTGESLALPRRLARSARRRLRRRKHRLERIRRLVIREGILTKEELDKLFEEKHEIDVWQLRVEALDRKLNNDELARVLLHLAKRRGFKSNRKSERSNKENSTMLKHIEENRAILSSYRTVGEMIVKDPKFALHKRNKGENYTNTIARDDLEREIRLIFSKQREFGNMSCTEEFENEYITIWASQRPVASKDDIEKKVGFCTFEPKEKRAPKATYTFQSFIAWEHINKLRLISPSGARGLTDEERRLLYEQAFQKNKITYHDIRTLLHLPDDTYFKGIVYDRGESRKQNENIRFLELDAYHQIRKAVDKVYGKGKSSSFLPIDFDTFGYALTLFKDDADIHSYLRNEYEQNGKRMPNLANKVYDNELIEELLNLSFTKFGHLSLKALRSILPYMEQGEVYSSACERAGYTFTGPKKKQKTMLLPNIPPIANPVVMRALTQARKVVNAIIKKYGSPVSIHIELARDLSQTFDERRKTKKEQDENRKKNETAIRQLMEYGLTLNPTGHDIVKFKLWSEQNGRCAYSLQPIEIERLLEPGYVEVDHVIPYSRSLDDSYTNKVLVLTRENREKGNRIPAEYLGVGTERWQQFETFVLTNKQFSKKKRDRLLRLHYDENEETEFKNRNLNDTRYISRFFANFIREHLKFAESDDKQKVYTVNGRVTAHLRSRWEFNKNREESDLHHAVDAVIVACTTPSDIAKVTAFYQRREQNKELAKKTEPHFPQPWPHFADELRARLSKHPKESIKALNLGNYDDQKLESLQPVFVSRMPKRSVTGAAHQETLRRYVGIDERSGKIQTVVKTKLSEIKLDASGHFPMYGKESDPRTYEAIRQRLLEHNNDPKKAFQEPLYKPKKNGEPGPVIRTVKIIDTKNQVIPLNDGKTVAYNSNIVRVDVFEKDGKYYCVPVYTMDIMKGILPNKAIEPNKPYSEWKEMTEDYTFRFSLYPNDLIRIELPREKTVKTAAGEEINVKDVFVYYKTIDSANGGLELISHDHRFSLRGVGSRTLKRFEKYQVDVLGNIYKVRGEKRVGLASSAHSKPGKTIRPLQSTRD

SEQ ID NO: 8350 - protein, 1378 aa, synthetic construct
MDKKYSIGLDIGTNSVGWAVITDEYKVPSKKFKVLGNTDRHSIKKNLIGALLFDSGETAEATRLKRTARRRYTRRKNRICYLQEIFSNEMAKVDDSFFHRLEESFLVEEDKKHERHPIFGNIVDEVAYHEKYPTIYHLRKKLVDSTDKADLRLIYLALAHMIKFRGHFLIEGDLNPDNSDVDKLFIQLVQTYNQLFEENPINASGVDAKAILSARLSKSRKLENLIAQLPGEKKNGLFGNLIALSLGLTPNFKSNFDLAEDAKLQLSKDTYDDDLDNLLAQIGDQYADLFLAAKNLSDAILLSDILRVNTEITKAPLSASMIKRYDEHHQDLTLLKALVRQQLPEKYKEIFFDQSKNGYAGYIDGGASQEEFYKFIKPILEKMDGTEELLVKLKREDLLRKQRTFDNGSIPHQIHLGELHAILRRQEDFYPFLKDNREKIEKILTFRIPYYVGPLARGNSRFAWMTRKSEETITPWNFEEVVDKGASAQSFIERMTNFDKNLPNEKVLPKHSLLYEYFTVYNELTKVKYVTEGMRKPAFLSGEQKKAIVDLLFKTNRKVTVKQLKEDYFKKIECFDSVEISGVEDRFNASLGTYHDLLKIIKDKDFLDNEENEDILEDIVLTLTLFEDREMIEERLKTYAHLFDDKVMKQLKRRRYTGWGRLSRKLINGIRDKQSGKTILDFLKSDGFANRNFMQLIHDDSLTFKEDIQKAQVSGQGDSLHEHIANLAGSPAIKKGILQTVKVVDELVKVMGRHKPENIVIEMARENQTTQKGQKNSRERMKRIEEGIKELGSQILKEHPVENTQLQNEKLYLYYLQNGRDMYVDQELDINRLSDYDVDHIVPQSFLKDDSIDNKVLTRSDKNRGKSDNVPSEEVVKKMKNYWRQLLNAKLITQRKFDNLTKAERGGLSELDKAGFIKRQLVETRQITKHVAQILDSRMNTKYDENDKLIREVKVITLKSKLVSDFRKDFQFYKVREINNYHHAHDAYLNAVVGTALIKKYPKLESEFVYGDYKVYDVRKMIAKSEQEIGKATAKYFFYSNIMNFFKTEITLANGEIRKRPLIETNGETGEIVWDKGRDFATVRKVLSMPQVNIVKKTEIQTVGQNGGLFDDNPKSPLEVTPSKLVPLKKELNPKKYGGYQKPTTAYPVLLITDTKQLIPISVMNKKQFEQNPVKFLRDRGYQQVGKNDFIKLPKYTLVDIGDGIKRLWASSKEIHKGNQLVVSKKSQILLYHAHHLDSDLSNDYLQNHNQQFDVLFNEIISFSKKCKLGKEHIQKIENVYSNKKNSASIEELAESFIKLLGFTQLGATSPFNFLGVKLNQKQYKGKKDYILPCTEGTLIRQSITGLYETRVDLSKIGEDSGGSGGSKRTADGSEFES

SEQ ID NO: 8351 - protein, 1082 aa, synthetic construct
MAAFKPNSINYILGLDIGIASVGWAMVEIDEEENPIRLIDLGVRVFERAEVPKTGDSLAMARRLARSVRRLTRRRAHRLLRTRRLLKREGVLQAANFDENGLIKSLPNTPWQLRAAALDRKLTPLEWSAVLLHLIKHRGYLSQRKNEGETADKELGALLKGVAGNAHALQTGDFRTPAELALNKFEKESGHIRNQRSDYSHTFSRKDLQAELILLFEKQKEFGNPHVSGGLKEGIETLLMTQRPALSGDAVQKMLGHCTFEPAEPKAAKNTYTAERFIWLTKLNNLRILEQGSERPLTDTERATLMDEPYRKSKLTYAQARKLLGLEDTAFFKGLRYGKDNAEASTLMEMKAYHAISRALEKEGLKDKKSPLNLSPELQDEIGTAFSLFKTDEDITGRLKDRIQPEILEALLKHISFDKFVQISLKALRRIVPLMEQGKRYDEACAEIYGDHYGKKNTEEKIYLPPIPADEIRNPVVLRALSQARKVINGVVRRYGSPARIHIETAREVGKSFKDRKEIEKRQEENRKDREKAAAKFREYFPNFVGEPKSKDILKLRLYEQQHGKCLYSGKEINLGRLNEKGYVEIDHALPFSRTWDDSFNNKVLVLGSENQNKGNQTPYEYFNGKDNSREWQEFKARVETSRFPRSKKQRILLQKFDEDGFKERNLNDTRYVNRFLCQFVADRMRLTGKGKKRVFASNGQITNLLRGFWGLRKVRAENDRHHALDAVVVACSTVAMQQKITRFVRYKEMNAFDGKTIDKETGEVLHQKTHFPQPWEFFAQEVMIRVFGKPDGKPEFEEADTLEKLRTLLAEKLSSRPEAVHEYVTPLFVSRAPNRKMSGQGHMETVKSAKRLDEGVSVLRVPLTQLKLKDLEKMVNREREPKLYEALKARLEAHKDDPAKAFAEPFYKYDKAGNRTQQVKAVRVEQVQKTGVWVRNHNGIADNATMVRVDVFEKGDKYYLVPIYSWQVAKGILPDRAVVQGKDEEDWQLIDDSFNFKFSLHPNDLVEVITKKARMFGYFASCHRGTGNINIRIHDLDHKIGKNGILEGIGVKTALSFQKYQIDELGKEIRPCRLKKRPPVR

SEQ ID NO: 8352 - protein, 1375 aa, synthetic construct
MEKKYSIGLDIGTNSVGWAVITDDYKVPSKKFKVLGNTNRKSIKKNLMGALLFDSGETAEATRLKRTARRRYTRRKNRIRYLQEIFANEMAKLDDSFFQRLEESFLVEEDKKNERHPIFGNLADEVAYHRNYPTIYHLRKKLADSPEKADLRLIYLALAHIIKFRGHFLIEGKLNAENSDVAKLFYQLIQTYNQLFEESPLDEIEVDAKGILSARLSKSKRLEKLIAVFPNEKKNGLFGNIIALALGLTPNFKSNFDLTEDAKLQLSKDTYDDDLDELLGQIGDQYADLFSAAKNLSDAILLSDILRSNSEVTKAPLSASMVKRYDEHHQDLALLKTLVRQQFPEKYAEIFKDDTKNGYAGYVGIGIKHRKRTTKLATQEEFYKFIKPILEKMDGAEELLAKLNRDDLLRKQRTFDNGSIPHQIHLKELHAILRRQEEFYPFLKENREKIEKILTFRIPYYVGPLARGNSRFAWLTRKSEEAITPWNFEEVVDKGASAQSFIERMTNFDEQLPNKKVLPKHSLLYEYFTVYNELTKVKYVTERMRKPEFLSGEQKKAIVDLLFKTNRKVTVKQLKEDYFKKIECFDSVEIIGVEDRFNASLGTYHDLLKIIKDKDFLDNEENEDILEDIVLTLTLFEDREMIEERLKTYAHLFDDKVMKQLKRRHYTGWGRLSRKMINGIRDKQSGKTILDFLKSDGFSNRNFMQLIHDDSLTFKEEIEKAQVSGQGDSLHEQIADLAGSPAIKKGILQTVKIVDELVKVMGHKPENIVIEMARENQTTTKGLQQSRERKKRIEEGIKELESQILKENPVENTQLQNEKLYLYYLQNGRDMYVDQELDINRLSDYDVDHIVPQSFIKDDSIDNKVLTRSVENRGKSDNVPSEEVVKKMKNYWRQLLNAKLITQRKFDNLTKAERGGLSEADKAGFIKRQLVETRQITKHVARILDSRMNTKRDKNDKPIREVKVITLKSKLVSDFRKDFQLYKVRDINNYHHAHDAYLNAVVGTALIKKYPKLESEFVYGDYKVYDVRKMIAKSEQEIGKATAKRFFYSNIMNFFKTEVKLANGEIRKRPLIETNGETGEVVWNKEKDFATVRKVLAMPQVNIVKKTEVQTGGFSKESILSKRESAKLIPRKKGWDTRKYGGFGSPTVAYSILVVAKVEKGKAKKLKSVKVLVGITIMEKGSYEKDPIGFLEAKGYKDIKKELIFKLPKYSLFELENGRRRMLASATELQKANELVLPQHLVRLLYYTQNISATTGSNNLGYIEQHREEFKEIFEKIIDFSEKYILKNKVNSNLKSSFDEQFAVSDSILLSNSFVSLLKYTSFGASGGFTFLDLDVKQGRLRYQTVTEVLDATLIYQSITGLYETRTDLSQLGGD

SEQ ID NO: 8353 - protein, 1375 aa, synthetic construct
MEKKYSIGLDIGTNSVGWAVITDDYKVPSKKFKVLGNTNRKSIKKNLMGALLFDSGETAEATRLKRTARRRYTRRKNRIRYLQEIFANEMAKLDDSFFQRLEESFLVEEDKKNERHPIFGNLADEVAYHRNYPTIYHLRKKLADSPEKADLRLIYLALAHIIKFRGHFLIEGKLNAENSDVAKLFYQLIQTYNQLFEESPLDEIEVDAKGILSARLSKSKRLEKLIAVFPNEKKNGLFGNIIALALGLTPNFKSNFDLTEDAKLQLSKDTYDDDLDELLGQIGDQYADLFSAAKNLSDAILLSDILRSNSEVTKAPLSASMVKRYDEHHQDLALLKTLVRQQFPEKYAEIFKDDTKNGYAGYVGADKKLRKRSGKLATEEEFYKFIKPILEKMDGAEELLAKLNRDDLLRKQRTFDNGSIPHQIHLKELHAILRRQEEFYPFLKENREKIEKILTFRIPYYVGPLARGNSRFAWLTRKSEEAITPWNFEEVVDKGASAQSFIERMTNFDEQLPNKKVLPKHSLLYEYFTVYNELTKVKYVTERMRKPEFLSGEQKKAIVDLLFKTNRKVTVKQLKEDYFKKIECFDSVEIIGVEDRFNASLGTYHDLLKIIKDKDFLDNEENEDILEDIVLTLTLFEDREMIEERLKTYAHLFDDKVMKQLKRRHYTGWGRLSRKMINGIRDKQSGKTILDFLKSDGFSNANFMQLIHDDSLTFKEEIEKAQVSGQGDSLHEQIADLAGSPAIKKGILQTVKIVDELVKVMGHKPENIVIEMARENQTTTKGLQQSRERKKRIEEGIKELESQILKENPVENTQLQNEKLYLYYLQNGRDMYVDQELDINRLSDYDVDHIVPQSFIKDDSIDNKVLTRSVENRGKSDNVPSEEVVKKMKNYWRQLLNAKLITQRKFDNLTKAERGGLSEADKAGFIKRQLVETRQITKHVARILDSRMNTKRDKNDKPIREVKVITLKSKLVSDFRKDFQLYKVRDINNYHHAHDAYLNAVVGTALIKKYPKLESEFVYGDYKVYDVRKMIAKSEQEIGKATAKRFFYSNIMNFFKTEVKLANGEIRKRPLIETNGETGEVVWNKEKDFATVRKVLAMPQVNIVKKTEVQTGGFSKESILSKRESAKLIPRKKGWDTRKYGGFGSPTVAYSILVVAKVEKGKAKKLKSVKVLVGITIMEKGSYEKDPIGFLEAKGYKDIKKELIFKLPKYSLFELENGRRRMLASAKELQKANELVLPQHLVRLLYYTQNISATTGSNNLGYIEQHREEFKEIFEKIIDFSEKYILKNKVNSNLKSSFDEQFAVSDSILLSNSFVSLLKYTSFGASGGFTFLDLDVKQGRLRYQTVTEVLDATLIYQSITGLYETRTDLSQLGGD

SEQ ID NO: 8354 - protein, 1368 aa, synthetic construct
MDKKYSIGLDIGTNSVGWAVITDEYKVPSKKFKVLGNTDRHSIKKNLIGALLFDSGETAEATRLKRTARRRYTRRKNRICYLQEIFSNEMAKVDDSFFHRLEESFLVEEDKKHERHPIFGNIVDEVAYHEKYPTIYHLRKKLVDSTDKADLRLIYLALAHMIKFRGHFLIEGDLNPDNSDVDKLFIQLVQTYNQLFEENPINASGVDAKAILSARLSKSRRLENLIAQLPGEKKNGLFGNLIALSLGLTPNFKSNFDLAEDAKLQLSKDTYDDDLDNLLAQIGDQYADLFLAAKNLSDAILLSDILRVNTEITKAPLSASMVKRYDEHHQDLTLLKALVRQQLPEKYKEIFFDQSKNGYAGYIDGGASQEEFYKFIKPILEKMDGTEELLVKLNREDLLRKQRTFDNGIIPHQIHLGELHAILRRQGDFYPFLKDNREKIEKILTFRIPYYVGPLARGNSRFAWMTRKSEETITPWNFEEVVDKGASAQSFIERMTNFDKNLPNEKVLPKHSLLYEYFTVYNELTKVKYVTEGMRKPAFLSGEQKKAIVDLLFKTNRKVTVKQLKEDYFKKIECFDSVEISGVEDRFNASLGTYHDLLKIIKDKDFLDNEENEDILEDIVLTLTLFEDREMIEERLKTYAHLFDDKVMKQLKRLRYTGWGRLSRKLINGIRDKQSGKTILDFLKSDGFANRNFMQLIHDDSLTFKEDIQKAQVSGQGDSLHEHIANLAGSPAIKKGILQTVKVVDELVKVMGGHKPENIVIEMARENQTTQKGQKNSRERMKRIEEGIKELGSQILKEHPVENTQLQNEKLYLYYLQNGRDMYVDQELDINRLSDYDVDHIVPQSFLKDDSIDNKVLTRSDKNRGKSDNVPSEEVVKKMKNYWRQLLNAKLITQRKFDNLTKAERGGLSELDKAGFIKRQLVETRQITKHVAQILDSRMNTKYDENDKLIREVKVITLKSKLVSDFRKDFQFYKVREINNYHHAHDAYLNAVVGTALIKKYPKLESEFVYGDYKVYDVRKMIAKSEQEIGKATAKYFFYSNIMNFFKTEITLANGEIRKRPLIETNGETGEIVWDKGRDFATVRKVLSMPQVNIVKKTEVQTGGFSKESILPKGNSDKLIARKKDWDPKKYGGFNSPTAAYSVLVVAKVEKGKSKKLKSVKELLGITIMERSSFEKNPIGFLEAKGYKEVKKDLIIKLPKYSLFELENGRKRMLASAGVLHKGNELALPSKYVNFLYLASHYEKLKGSPEDNEQKQLFVEQHKHYLDEIIEQISEFSKRVILADANLDKVLSAYNKHRDKPIREQAENIIHLFTLTNLGVPAAFKYFDTTIDKKRYTSTKEVLDATLIHQSITGLYETRIDLSQLGGD

SEQ ID NO: 8355 - protein, 1368 aa, synthetic construct
MDKKYSIGLDIGTNSVGWAVITDEYKVPSKKFKVLGNTDRHSIKKNLIGALLFDSGETAEATRLKRTARRRYTRRKNRICYLQEIFSNEMAKVDDSFFHRLEESFLVEEDKKHERHPIFGNIVDEVAYHEKYPTIYHLRKKLVDSTDKADLRLIYLALAHMIKFRGHFLIEGDLNPDNSDVDKLFIQLVQTYNQLFEENPINASGVDAKAILSARLSKSRRLENLIAQLPGEKKNGLFGNLIALSLGLTPNFKSNFDLAEDAKLQLSKDTYDDDLDNLLAQIGDQYADLFLAAKNLSDAILLSDILRVNTEITKAPLSASMVKRYDEHHQDLTLLKALVRQQLPEKYKEIFFDQSKNGYAGYIDGGASQEEFYKFIKPILEKMDGTEELLVKLNREDLLRKQRTFDNGIIPHQIHLGELHAILRRQGDFYPFLKDNREKIEKILTFRIPYYVGPLARGNSRFAWMTRKSEETITPWNFEEVVDKGASAQSFIERMTNFDKNLPNEKVLPKHSLLYEYFTVYNELTKVKYVTEGMRKPAFLSGEQKKAIVDLLFKTNRKVTVKQLKEDYFKKIECFDSVEISGVEDRFNASLGTYHDLLKIIKDKDFLDNEENEDILEDIVLTLTLFEDREMIEERLKTYAHLFDDKVMKQLKRLRYTGWGRLSRKLINGIRDKQSGKTILDFLKSDGFANRNFMQLIHDDSLTFKEDIQKAQVSGQGDSLHEHIANLAGSPAIKKGILQTVKVVDELVKVMGGHKPENIVIEMARENQTTQKGQKNSRERMKRIEEGIKELGSQILKEHPVENTQLQNEKLYLYYLQNGRDMYVDQELDINRLSDYDVDHIVPQSFLKDDSIDNKVLTRSDKNRGKSDNVPSEEVVKKMKNYWRQLLNAKLITQRKFDNLTKAERGGLSELDKAGFIKRQLVETRQITKHVAQILDSRMNTKYDENDKLIREVKVITLKSKLVSDFRKDFQFYKVREINNYHHAHDAYLNAVVGTALIKKYPKLESEFVYGDYKVYDVRKMIAKSEQEIGKATAKYFFYSNIMNFFKTEITLANGEIRKRPLIETNGETGEIVWDKGRDFATVRKVLSMPQVNIVKKTEVQTGGFSKESILPKGNSDKLIARKKDWDPKKYGGFNSPTVAYSVLVVAKVEKGKSKKLKSVKELLGITIMERSSFEKNPIGFLEAKGYKEVKKDLIIKLPKYSLFELENGRKRMLASASVLHKGNELALPSKYVNFLYLASHYEKLKGSSEDNKQKQLFVEQHKHYLDEIIEQISEFSKRVILADANLDKVLSAYNKHRDKPIREQAENIIHLFTLTNLGASAAFKYFDTTIGRKLYTSTKEVLDATLIHQSITGLYETRIDLSQLGGD

SEQ ID NO: 8356 - protein, 1368 aa, synthetic construct
MDKKYSIGLDIGTNSVGWAVITDEYKVPSKKFKVLGNTDRHSIKKNLIGALLFDSGETAEATRLKRTARRRYTRRKNRICYLQEIFSNEMAKVDDSFFHRLEESFLVEEDKKHERHPIFGNIVDEVAYHEKYPTIYHLRKKLVDSTDKADLRLIYLALAHMIKFRGHFLIEGDLNPDNSDVDKLFIQLVQTYNQLFEENPINASGVDAKAILSARLSKSRRLENLIAQLPGEKKNGLFGNLIALSLGLTPNFKSNFDLAEDAKLQLSKDTYDDDLDNLLAQIGDQYADLFLAAKNLSDAILLSDILRVNTEITKAPLSASMVKRYDEHHQDLTLLKALVRQQLPEKYKEIFFDQSKNGYAGYIDGGASQEEFYKFIKPILEKMDGTEELLVKLNREDLLRKQRTFDNGIIPHQIHLGELHAILRRQGDFYPFLKDNREKIEKILTFRIPYYVGPLARGNSRFAWMTRKSEETITPWNFEEVVDKGASAQSFIERMTNFDKNLPNEKVLPKHSLLYEYFTVYNELTKVKYVTEGMRKPAFLSGEQKKAIVDLLFKTNRKVTVKQLKEDYFKKIECFDSVEISGVEDRFNASLGTYHDLLKIIKDKDFLDNEENEDILEDIVLTLTLFEDREMIEERLKTYAHLFDDKVMKQLKRLRYTGWGRLSRKLINGIRDKQSGKTILDFLKSDGFANRNFMQLIHDDSLTFKEDIQKAQVSGQGDSLHEHIANLAGSPAIKKGILQTVKVVDELVKVMGGHKPENIVIEMARENQTTQKGQKNSRERMKRIEEGIKELGSQILKEHPVENTQLQNEKLYLYYLQNGRDMYVDQELDINRLSDYDVDHIVPQSFLKDDSIDNKVLTRSDKNRGKSDNVPSEEVVKKMKNYWRQLLNAKLITQRKFDNLTKAERGGLSELDKAGFIKRQLVETRQITKHVAQILDSRMNTKYDENDKLIREVKVITLKSKLVSDFRKDFQFYKVREINNYHHAHDAYLNAVVGTALIKKYPKLESEFVYGDYKVYDVRKMIAKSEQEIGKATAKYFFYSNIMNFFKTEITLANGEIRKRPLIETNGETGEIVWDKGRDFATVRKVLSMPQVNIVKKTEVQTGGFSKESILPKGNSDKLIARKKDWDPKKYGGFNSPTVAYSVLVVAKVEKGKSKKLKSVKELLGITIMERSSFEKNPIDFLEAKGYKEVKKDLIIKLPKYSLFELENGRKRMLASAGVLQKGNELALPSKYVNFLYLASHYEKLKGSPEDNEQKQLFVEQHKHYLDEIIEQISEFSKRVILADANLDKVLSAYNKHRDKPIREQAENIIHLFTLTNLGAPAAFKYFDTTINRKQYNTTKEVLDATLIRQSITGLYETRIDLSQLGGD

SEQ ID NO: 8357 - protein, 1368 aa, synthetic construct [sequence omitted]

SEQ ID NO: 8358 - protein, 1368 aa, synthetic construct
MDKKYSIGLDIGTNSVGWAVITDEYKVPSKKFKVLGNTDRHSIKKNLIGALLFDSGETAEATRLKRTARRRYTRRKNRICYLQEIFSNEMAKVDDSFFHRLEESFLVEEDKKHERHPIFGNIVDEVAYHEKYPTIYHLRKKLVDSTDKADLRLIYLALAHMIKFRGHFLIEGDLNPDNSDVDKLFIQLVQTYNQLFEENPINASGVDAKAILSARLSKSRRLENLIAQLPGEKKNGLFGNLIALSLGLTPNFKSNFDLAEDAKLQLSKDTYDDDLDNLLAQIGDQYADLFLAAKNLSDAILLSDILRVNTEITKAPLSASMIKRYDEHHQDLTLLKALVRQQLPEKYKEIFFDQSKNGYAGYIDGGASQEEFYKFIKPILEKMDGTEELLVKLNREDLLRKQRTFDNGSIPHQIHLGELHAILRRQEDFYPFLKDNREKIEKILTFRIPYYVGPLARGNSRFAWMTRKSEETITPWNFEEVVDKGASAQSFIERMTNFDKNLPNEKVLPKHSLLYEYFTVYNELTKVKYVTEGMRKPAFLSGEQKKAIVDLLFKTNRKVTVKQLKEDYFKKIECFDSVEISGVEDRFNASLGTYHDLLKIIKDKDFLDNEENEDILEDIVLTLTLFEDREMIEERLKTYAHLFDDKVMKQLKRRRYTGWGRLSRKLINGIRDKQSGKTILDFLKSDGFANRNFMQLIHDDSLTFKEDIQKAQVSGQGDSLHEHIANLAGSPAIKKGILQTVKVVDELVKVMGRHKPENIVIEMARENQTTQKGQKNSRERMKRIEEGIKELGSQILKEHPVENTQLQNEKLYLYYLQNGRDMYVDQELDINRLSDYDVDHIVPQSFLKDDSIDNKVLTRSDKNRGKSDNVPSEEVVKKMKNYWRQLLNAKLITQRKFDNLTKAERGGLSELDKAGFIKRQLVETRQITKHVAQILDSRMNTKYDENDKLIREVKVITLKSKLVSDFRKDFQFYKVREINNYHHAHDAYLNAVVGTALIKKYPKLESEFVYGDYKVYDVRKMIAKSEQEIGKATAKYFFYSNIMNFFKTEITLANGEIRKRPLIETNGETGEIVWDKGRDFATVRKVLSMPQVNIVKKTEVQTGGFSKESILPKRNSDKLIARKKDWDPKKYGGFDSPTVAYSVLVVAKVEKGKSKKLKSVKELLGITIMERSSFEKNPIDFLEAKGYKEVKKDLIIKLPKYSLFELENGRKRMLASARELQKGNELALPSKYVNFLYLASHYEKLKGSPEDNEQKQLFVEQHKHYLDEIIEQISEFSKRVILADAQLDKVLSAYNKHRDKPIREQAENIIHLFTLTNLGAPAAFKYFDTTFKQKQYRSTKEVLDATLIHQSITGLYETRIDLSQLGGD

SEQ ID NO: 8359 - protein, 1368 aa, synthetic construct
MDKKYSIGLDIGTNSVGWAVITDEYKVPSKKFKVLGNTDRHSIKKNLIGALLFDSGETAEATRLKRTARRRYTRRKNRICYLQEIFSNEMAKVDDSFFHRLEESFLVEEDKKHERHPIFGNIVDEVAYHEKYPTIYHLRKKLVDSTDKADLRLIYLALAHMIKFRGHFLIEGDLNPDNSDVDKLFIQLVQTYNQLFEENPINASGVDAKAILSARLSKSRRLENLIAQLPGEKKNGLFGNLIALSLGLTPNFKSNFDLAEDAKLQLSKDTYDDDLDNLLAQIGDQYADLFLAAKNLSDAILLSDILRVNTEITKAPLSASMIKRYDEHHQDLTLLKALVRQQLPEKYKEIFFDQSKNGYAGYIDGGASQEEFYKFIKPILEKMDGTEELLVKLNREDLLRKQRTFDNGSIPHQIHLGELHAILRRQEDFYPFLKDNREKIEKILTFRIPYYVGPLARGNSRFAWMTRKSEETITPWNFEEVVDKGASAQSFIERMTNFDKNLPNEKVLPKHSLLYEYFTVYNELTKVKYVTEGMRKPAFLSGEQKKAIVDLLFKTNRKVTVKQLKEDYFKKIECFDSVEISGVEDRFNASLGTYHDLLKIIKDKDFLDNEENEDILEDIVLTLTLFEDREMIEERLKTYAHLFDDKVMKQLKRRRYTGWGRLSRKLINGIRDKQSGKTILDFLKSDGFANRNFMQLIHDDSLTFKEDIQKAQVSGQGDSLHEHIANLAGSPAIKKGILQTVKVVDELVKVMGRHKPENIVIEMARENQTTQKGQKNSRERMKRIEEGIKELGSQILKEHPVENTQLQNEKLYLYYLQNGRDMYVDQELDINRLSDYDVDHIVPQSFLKDDSIDNKVLTRSDKNRGKSDNVPSEEVVKKMKNYWRQLLNAKLITQRKFDNLTKAERGGLSELDKAGFIKRQLVETRQITKHVAQILDSRMNTKYDENDKLIREVKVITLKSKLVSDFRKDFQFYKVREINNYHHAHDAYLNAVVGTALIKKYPKLESEFVYGDYKVYDVRKMIAKSEQEIGKATAKYFFYSNIMNFFKTEITLANGEIRKRPLIETNGETGEIVWDKGRDFATVRKVLSMPQVNIVKKTEVQTGGFSKESILPKRNSDKLIARKKDWDPKKYGGFLWPTVAYSVLVVAKVEKGKSKKLKSVKELLGITIMERSSFEKNPIDFLEAKGYKEVKKDLIIKLPKYSLFELENGRKRMLASAKQLQKGNELALPSKYVNFLYLASHYEKLKGSPEDNEQKQLFVEQHKHYLDEIIEQISEFSKRVILADANLDKVLSAYNKHRDKPIREQAENIIHLFTLTNLGAPAAFKYFDTTIDRKQYRSTKEVLDATLIHQSITGLYETRIDLSQLGGD

SEQ ID NO: 8360 - protein, 1368 aa, synthetic construct
MDKKYSIGLDIGTNSVGWAVITDEYKVPSKKFKVLGNTDRHSIKKNLIGALLFDSGETAEATRLKRTARRRYTRRKNRICYLQEIFSNEMAKVDDSFFHRLEESFLVEEDKKHERHPIFGNIVDEVAYHEKYPTIYHLRKKLVDSTDKADLRLIYLALAHMIKFRGHFLIEGDLNPDNSDVDKLFIQLVQTYNQLFEENPINASGVDAKAILSARLSKSRRLENLIAQLPGEKKNGLFGNLIALSLGLTPNFKSNFDLAEDAKLQLSKDTYDDDLDNLLAQIGDQYADLFLAAKNLSDAILLSDILRVNTEITKAPLSASMIKRYDEHHQDLTLLKALVRQQLPEKYKEIFFDQSKNGYAGYIDGGASQEEFYKFIKPILEKMDGTEELLVKLNREDLLRKQRTFDNGSIPHQIHLGELHAILRRQEDFYPFLKDNREKIEKILTFRIPYYVGPLARGNSRFAWMTRKSEETITPWNFEEVVDKGASAQSFIERMTNFDKNLPNEKVLPKHSLLYEYFTVYNELTKVKYVTEGMRKPAFLSGEQKKAIVDLLFKTNRKVTVKQLKEDYFKKIECFDSVEISGVEDRFNASLGTYHDLLKIIKDKDFLDNEENEDILEDIVLTLTLFEDREMIEERLKTYAHLFDDKVMKQLKRRRYTGWGRLSRKLINGIRDKQSGKTILDFLKSDGFANRNFMQLIHDDSLTFKEDIQKAQVSGQGDSLHEHIANLAGSPAIKKGILQTVKVVDELVKVMGRHKPENIVIEMARENQTTQKGQKNSRERMKRIEEGIKELGSQILKEHPVENTQLQNEKLYLYYLQNGRDMYVDQELDINRLSDYDVDHIVPQSFLKDDSIDNKVLTRSDKNRGKSDNVPSEEVVKKMKNYWRQLLNAKLITQRKFDNLTKAERGGLSELDKAGFIKRQLVETRQITKHVAQILDSRMNTKYDENDKLIREVKVITLKSKLVSDFRKDFQFYKVREINNYHHAHDAYLNAVVGTALIKKYPKLESEFVYGDYKVYDVRKMIAKSEQEIGKATAKYFFYSNIMNFFKTEITLANGEIRKRPLIETNGETGEIVWDKGRDFATVRKVLSMPQVNIVKKTEVQTGGFSKESILPKRNSDKLIARKKDWDPKKYGGFVSPTVAYSVLVVAKVEKGKSKKLKSVKELLGITIMERSSFEKNPIDFLEAKGYKEVKKDLIIKLPKYSLFELENGRKRMLASAGELQKGNELALPSKYVNFLYLASHYEKLKGSPEDNEQKQLFVEQHKHYLDEIIEQISEFSKRVILADANLDKVLSAYNKHRDKPIREQAENIIHLFTLTNLGAPAAFKYFDTTIDRKQYRSTKEVLDATLIHQSITGLYETRIDLSQLGGD

SEQ ID NO: 8361 - protein, 1368 aa, synthetic construct
MDKKYSIGLDIGTNSVGWAVITDEYKVPSKKFKVLGNTDRHSIKKNLIGALLFDSGETAEATRLKRTARRRYTRRKNRICYLQEIFSNEMAKVDDSFFHRLEESFLVEEDKKHERHPIFGNIVDEVAYHEKYPTIYHLRKKLVDSTDKADLRLIYLALAHMIKFRGHFLIEGDLNPDNSDVDKLFIQLVQTYNQLFEENPINASGVDAKAILSARLSKSRRLENLIAQLPGEKKNGLFGNLIALSLGLTPNFKSNFDLAEDAKLQLSKDTYDDDLDNLLAQIGDQYADLFLAAKNLSDAILLSDILRVNTEITKAPLSASMIKRYDEHHQDLTLLKALVRQQLPEKYKEIFFDQSKNGYAGYIDGGASQEEFYKFIKPILEKMDGTEELLVKLNREDLLRKQRTFDNGSIPHQIHLGELHAILRRQEDFYPFLKDNREKIEKILTFRIPYYVGPLARGNSRFAWMTRKSEETITPWNFEEVVDKGASAQSFIERMTNFDKNLPNEKVLPKHSLLYEYFTVYNELTKVKYVTEGMRKPAFLSGEQKKAIVDLLFKTNRKVTVKQLKEDYFKKIECFDSVEISGVEDRFNASLGTYHDLLKIIKDKDFLDNEENEDILEDIVLTLTLFEDREMIEERLKTYAHLFDDKVMKQLKRRRYTGWGRLSRKLINGIRDKQSGKTILDFLKSDGFANRNFMQLIHDDSLTFKEDIQKAQVSGQGDSLHEHIANLAGSPAIKKGILQTVKVVDELVKVMGRHKPENIVIEMARENQTTQKGQKNSRERMKRIEEGIKELGSQILKEHPVENTQLQNEKLYLYYLQNGRDMYVDQELDINRLSDYDVDHIVPQSFLKDDSIDNKVLTRSDKNRGKSDNVPSEEVVKKMKNYWRQLLNAKLITQRKFDNLTKAERGGLSELDKAGFIKRQLVETRQITKHVAQILDSRMNTKYDENDKLIREVKVITLKSKLVSDFRKDFQFYKVREINNYHHAHDAYLNAVVGTALIKKYPKLESEFVYGDYKVYDVRKMIAKSEQEIGKATAKYFFYSNIMNFFKTEITLANGEIRKRPLIETNGETGEIVWDKGRDFATVRKVLSMPQVNIVKKTEVQTGGFSKESILPKRNSDKLIARKKDWDPKKYGGFVSPTVAYSVLVVAKVEKGKSKKLKSVKELLGITIMERSSFEKNPIDFLEAKGYKEVKKDLIIKLPKYSLFELENGRKRMLASARELQKGNELALPSKYVNFLYLASHYEKLKGSPEDNEQKQLFVEQHKHYLDEIIEQISEFSKRVILADANLDKVLSAYNKHRDKPIREQAENIIHLFTLTNLGAPAAFKYFDTTIDRKEYRSTKEVLDATLIHQSITGLYETRIDLSQLGGD

SEQ ID NO: 8362 - protein, 1368 aa, synthetic construct
MDKKYSIGLDIGTNSVGWAVITDEYKVPSKKFKVLGNTDRHSIKKNLIGALLFDSGETAEATRLKRTARRRYTRRKNRICYLQEIFSNEMAKVDDSFFHRLEESFLVEEDKKHERHPIFGNIVDEVAYHEKYPTIYHLRKKLVDSTDKADLRLIYLALAHMIKFRGHFLIEGDLNPDNSDVDKLFIQLVQTYNQLFEENPINASGVDAKAILSARLSKSRRLENLIAQLPGEKKNGLFGNLIALSLGLTPNFKSNFDLAEDTKLQLSKDTYDDDLDNLLAQIGDQYADLFLAAKNLSDAILLSDILRVNTEITKAPLSASMIKLYDEHHQDLTLLKALVRQQLPEKYKEIFFDQSKNGYAGYIDGGASQEEFYKFIKPILEKMDGTEELLVKLNREDLLRKQRTFDNGIIPHQIHLGELHAILRRQEDFYPFLKDNREKIEKILTFRIPYYVGPLARGNSRFAWMTRKSEETITPWNFEKVVDKGASAQSFIERMTNFDKNLPNEKVLPKHSLLYEYFTVYNELTKVKYVTEGMRKPAFLSGDQKKAIVDLLFKTNRKVTVKQLKEDYFKKIECFDSVEISGVEDRFNASLGTYHDLLKIIKDKDFLDNEENEDILEDIVLTLTLFEDREMIEERLKTYAHLFDDKVMKQLKRRRYTGWGRLSRKLINGIRDKQSGKTILDFLKSDGFANRNFIQLIHDDSLTFKEDIQKAQVSGQGDSLHEHIANLAGSPAIKKGILQTVKVVDELVKVMGRHKPENIVIEMARENQTTQKGQKNSRERMKRIEEGIKELGSQILKEHPVENTQLQNEKLYLYYLQNGRDMYVDQELDINRLSDYDVDHIVPQSFLKDDSIDNKVLTRSDKNRGKSDNVPSEEVVKKMKNYWRQLLNAKLITQRKFDNLTKAERGGLSELDKAGFIKRQLVETRQITKHVAQILDSRMNTKYDENDKLIREVKVITLKSKLVSDFRKDFQFYKVREINNYHHAHDAYLNAVVGTALIKKYPKLESEFVYGDYKVYDVRKMIAKSEQEIGKATAKYFFYSNIMNFFKTEITLANGEIRKRPLIETNGETGEIVWDKGRDFATVRKVLSMPQVNIVKKTEVQTGGFSKESILPKRNSDKLIARKKDWDPKKYGGFDSPTVAYSVLVVAKVEKGKSKKLKSVKELLGITIMERSSFEKNPIDFLEAKGYKEVKKDLIIKLPKYSLFELENGRKRMLASAGVLQKGNELALPSKYVNFLYLASHYEKLKGSPEDNEQKQLFVEQHKHYLDEIIEQISEFSKRVILADANLDKVLSAYNKHRDKPIREQAENIIHLFTLTNLGAPAAFKYFDTTIDRKRYTSTKEVLDATLIHQSITGLYETRIDLSQLGGD

SEQ ID NO: 8363 - protein, 1368 aa, synthetic construct
MDKKYSIGLDIGTNSVGWAVITDEYKVPSKKFKVLGNTDRHSIKKNLIGALLFDSGETAEATRLKRTARRRYTRRKNRICYLQEIFSNEMAKVDDSFFHRLEESFLVEEDKKHERHPIFGNIVDEVAYHEKYPTIYHLRKKLVDSTDKADLRLIYLALAHMIKFRGHFLIEGDLNPDNSDVDKLFIQLVQTYNQLFEENPINASGVDAKAILSARLSKSRRLENLIAQLPGEKKNGLFGNLIALSLGLTPNFKSNFDLAEDTKLQLSKDTYDDDLDNLLAQIGDQYADLFLAAKNLSDAILLSDILRVNTEITKAPLSASMIKLYDEHHQDLTLLKALVRQQLPEKYKEIFFDQSKNGYAGYIDGGASQEEFYKFIKPILEKMDGTEELLVKLNREDLLRKQRTFDNGIIPHQIHLGELHAILRRQEDFYPFLKDNREKIEKILTFRIPYYVGPLARGNSRFAWMTRKSEETITPWNFEKVVDKGASAQSFIERMTNFDKNLPNEKVLPKHSLLYEYFTVYNELTKVKYVTEGMRKPAFLSGDQKKAIVDLLFKTNRKVTVKQLKEDYFKKIECFDSVEISGVEDRFNASLGTYHDLLKIIKDKDFLDNEENEDILEDIVLTLTLFEDREMIEERLKTYAHLFDDKVMKQLKRRRYTGWGRLSRKLINGIRDKQSGKTILDFLKSDGFANRNFIQLIHDDSLTFKEDIQKAQVSGQGDSLHEHIANLAGSPAIKKGILQTVKVVDELVKVMGRHKPENIVIEMARENQTTQKGQKNSRERMKRIEEGIKELGSQILKEHPVENTQLQNEKLYLYYLQNGRDMYVDQELDINRLSDYDVDHIVPQSFLKDDSIDNKVLTRSDKNRGKSDNVPSEEVVKKMKNYWRQLLNAKLITQRKFDNLTKAERGGLSELDKAGFIKRQLVETRQITKHVAQILDSRMNTKYDENDKLIREVKVITLKSKLVSDFRKDFQFYKVREINNYHHAHDAYLNAVVGTALIKKYPKLESEFVYGDYKVYDVRKMIAKSEQEIGKATAKYFFYSNIMNFFKTEITLANGEIRKRPLIETNGETGEIVWDKGRDFATVRKVLSMPQVNIVKKTEVQTGGFSKESIRPKRNSDKLIARKKDWDPKKYGGFVSPTVAYSVLVVAKVEKGKSKKLKSVKELLGITIMERSSFEKNPIDFLEAKGYKEVKKDLIIKLPKYSLFELENGRKRMLASARFLQKGNELALPSKYVNFLYLASHYEKLKGSPEDNEQKQLFVEQHKHYLDEIIEQISEFSKRVILADANLDKVLSAYNKHRDKPIREQAENIIHLFTLTNLGAPRAFKYFDTTIDRKVYRSTKEVLDATLIHQSITGLYETRIDLSQLGGD

SEQ ID NO: 8364 - protein, 1122 aa, synthetic construct
MSDLVLGLDIGIGSVGVGILNKVTGEIIHKNSRIFPAAQAENNLVRRTNRQGRRLARRKKHRRVRLNRLFEESGLITDFTKISINLNPYQLRVKGLTDELSNEELFIALKNMVKHRGISYLDDASDDGNSSVGDYAQIVKENSKQLETKTPGQIQLERYQTYGQLRGDFTVEKDGKKHRLINVFPTSAYRSEALRILQTQQEFNPQITDEFINRYLEILTGKRKYYHGPGNEKSRTDYGRYRTSGETLDNIFGILIGKCTFYPDEFRAAKASYTAQEFNLLNDLNNLTVPTETKKLSKEQKNQIINYVKNEKAMGPAKLFKYIAKLLSCDVADIKGYRIDKSGKAEIHTFEAYRKMKTLETLDIEQMDRETLDKLAYVLTLNTEREGIQEALEHEFADGSFSQKQVDELVQFRKANSSIFGKGWHNFSVKLMMELIPELYETSEEQMTILTRLGKQKTTSSSNKTKYIDEKLLTEEIYNPVVAKSVRQAIKIVNAAIKEYGDFDNIVIEMARETNEDDEKKAIQKIQKANKDEKDAAMLKAANQYNGKAELPHSVFHGHKQLATKIRLWHQQGERCLYTGKTISIHDLINNSNQFEVDHILPLSITFDDSLANKVLVYATANQEKGQRTPYQALDSMDDAWSFRELKAFVRESKTLSNKKKEYLLTEEDISKFDVRKKFIERNLVDTRYASRVVLNALQEHFRAHKIDTKVSVVRGQFTSQLRRHWGIEKTRDTYHHHAVDALIIAASSQLNLWKKQKNTLVSYSEEQLLDIETGELISDDEYKESVFKAPYQHFVDTLKSKEFEDSILFSYQVDSKFNRKISDATIYATRQAKVGKDKKDETYVLGKIKDIYTQDGYDAFMKIYKKDKSKFLMYRHDPQTFEKVIEPILENYPNKQMNEKGKEVPCNPFLKYKEEHGYIRKYSKKGNGPEIKSLKYYDSKLLGNPIDITPENSKNKVVLQSLKPWRTDVYFNKATGKYEILGLKYADLQFEKGTGTYKISQEKYNDIKKKEGVDSDSEFKFTLYKNDLLLVKDTETKEQQLFRFLSRTLPKQKHYVELKPYDKQKFEGGEALIKVLGNVANGGQCIKGLAKSNISIYKVRTDVLGNQHIIKNEGDKPKLDF

SEQ ID NO: 8365 - protein, 1122 aa, synthetic construct
MSDLVLGLDIGIGSVGVGILNKVTGEIIHKNSRIFPAAQAENNLVRRTNRQGRRLARRKKHRRVRLNRLFEESGLITDFTKISINLNPYQLRVKGLTDELSNEELFIALKNMVKHRGISYLDDASDDGNSSVGDYAQIVKENSKQLETKTPGQIQLERYQTYGQLRGDFTVEKDGKKHRLINVFPTSAYRSEALRILQTQQEFNPQITDEFINRYLEILTGKRKYYHGPGNEKSRTDYGRYRTSGETLDNIFGILIGKCTFYPDEFRAAKASYTAQEFNLLNDLNNLTVPTETKKLSKEQKNQIINYVKNEKAMGPAKLFKYIAKLLSCDVADIKGYRIDKSGKAEIHTFEAYRKMKTLETLDIEQMDRETLDKLAYVLTLNTEREGIQEALEHEFADGSFSQKQVDELVQFRKANSSIFGKGWHNFSVKLMMELIPELYETSEEQMTILTRLGKQKTTSSSNKTKYIDEKLLTEEIYNPVVAKSVRQAIKIVNAAIKEYGDFDNIVIEMARETNEDDEKKAIQKIQKANKDEKDAAMLKAANQYNGKAELPHSVFHGHKQLATKIRLWHQQGERCLYTGKTISIHDLINNSNQFEVDHILPLSITFDDSLANKVLVYATANQEKGQRTPYQALDSMDDAWSFRELKAFVRESKTLSNKKKEYLLTEEDISKFDVRKKFIERNLVDTRYASRVVLNALQEHFRAHKIDTKVSVVRGQFTSQLRRHWGIEKTRDTYHHHAVDALIIAASSQLNLWKKQKNTLVSYSEEQLLDIETGELISDDEYKESVFKAPYQHFVDTLKSKEFEDSILFSYQVDSKFNRKISDATIYATRQAKVGKDKKDETYVLGKIKDIYTQDGYDAFMKIYKKDKSKFLMYRHDPQTFEKVIEPILENYPNKQMNEKGKEVPCNPFLKYKEEHGYIRKYSKKGNGPEIKSLKYYDSKLLGNPIDITPENSKNKVVLQSLKPWRTDVYFNKNTGKYEILGLKYADLQFEKKTGTYKISQEKYNGIMKEEGVDSDSEFKFTLYKNDLLLVKDTETKEQQLFRFLSRTMPNVKYYVELKPYSKDKFEKNESLIEILGSADKSGRCIKGLGKSNISIYKVRTDVLGNQHIIKNEGDKPKLDF

SEQ ID NO: 8366 - protein, 1120 aa, synthetic construct
MSDLVLGLDIGIGSVGVGILNKVTGEIIHKNSRIFPAAQAENNLVRRTNRQGRRLARRKKHRRVRLNRLFEESGLITDFTKISINLNPYQLRVKGLTDELSNEELFIALKNMVKHRGISYLDDASDDGNSSVGDYAQIVKENSKQLETKTPGQIQLERYQTYGQLRGDFTVEKDGKKHRLINVFPTSAYRSEALRILQTQQEFNPQITDEFINRYLEILTGKRKYYHGPGNEKSRTDYGRYRTSGETLDNIFGILIGKCTFYPDEFRAAKASYTAQEFNLLNDLNNLTVPTETKKLSKEQKNQIINYVKNEKAMGPAKLFKYIAKLLSCDVADIKGYRIDKSGKAEIHTFEAYRKMKTLETLDIEQMDRETLDKLAYVLTLNTEREGIQEALEHEFADGSFSQKQVDELVQFRKANSSIFGKGWHNFSVKLMMELIPELYETSEEQMTILTRLGKQKTTSSSNKTKYIDEKLLTEEIYNPVVAKSVRQAIKIVNAAIKEYGDFDNIVIEMARETNEDDEKKAIQKIQKANKDEKDAAMLKAANQYNGKAELPHSVFHGHKQLATKIRLWHQQGERCLYTGKTISIHDLINNSNQFEVDHILPLSITFDDSLANKVLVYATANQEKGQRTPYQALDSMDDAWSFRELKAFVRESKTLSNKKKEYLLTEEDISKFDVRKKFIERNLVDTRYASRVVLNALQEHFRAHKIDTKVSVVRGQFTSQLRRHWGIEKTRDTYHHHAVDALIIAASSQLNLWKKQKNTLVSYSEDQLLDIETGELISDDEYKESVFKAPYQHFVDTLKSKEFEDSILFSYQVDSKFNRKISDATIYATRQAKVGKDKADETYVLGKIKDIYTQDGYDAFMKIYKKDKSKFLMYRHDPQTFEKVIEPILENYPNKQINEKGKEVPCNPFLKYKEEHGYIRKYSKKGNGPEIKSLKYYDSKLGNHIDITPKDSNNKVVLQSLKPWRTDVYFNKNTGKYEILGLKYSDMQFEKGTGKYSISKEQYENIKVREGVDENSEFKFTLYKNDLLLLKDSENGEQILLRFTSRNDTSKHYVELKPYNRQKFEGSEYLIKSLGTVAKGGQCIKGLGKSNISIYKVRTDVLGNQHIIKNEGDKPKLDF

SEQ ID NO: 8367 - protein, 1120 aa, synthetic construct
MSDLVLGLDIGIGSVGVGILNKVTGEIIHKNSRIFPAAQAENNLVRRTNRQGRRLARRKKHRRVRLNRLFEESGLITDFTKISINLNPYQLRVKGLTDELSNEELFIALKNMVKHRGISYLDDASDDGNSSVGDYAQIVKENSKQLETKTPGQIQLERYQTYGQLRGDFTVEKDGKKHRLINVFPTSAYRSEALRILQTQQEFNPQITDEFINRYLEILTGKRKYYHGPGNEKSRTDYGRYRTSGETLDNIFGILIGKCTFYPDEFRAAKASYTAQEFNLLNDLNNLTVPTETKKLSKEQKNQIINYVKNEKAMGPAKLFKYIAKLLSCDVADIKGYRIDKSGKAEIHTFEAYRKMKTLETLDIEQMDRETLDKLAYVLTLNTEREGIQEALEHEFADGSFSQKQVDELVQFRKANSSIFGKGWHNFSVKLMMELIPELYETSEEQMTILTRLGKQKTTSSSNKTKYIDEKLLTEEIYNPVVAKSVRQAIKIVNAAIKEYGDFDNIVIEMARETNEDDEKKAIQKIQKANKDEKDAAMLKAANQYNGKAELPHSVFHGHKQLATKIRLWHQQGERCLYTGKTISIHDLINNSNQFEVDHILPLSITFDDSLANKVLVYATANQEKGQRTPYQALDSMDDAWSFRELKAFVRESKTLSNKKKEYLLTEEDISKFDVRKKFIERNLVDTRYASRVVLNALQEHFRAHKIDTKVSVVRGQFTSQLRRHWGIEKTRDTYHHHAVDALIIAASSQLNLWKKQKNTLVSYSEDQLLDIETGELISDDEYKESVFKAPYQHFVDTLKSKEFEDSILFSYQVDSKFNRKISDATIYATRQAKVGKDKADETYVLGKIKDIYTQDGYDAFMKIYKKDKSKFLMYRHDPQTFEKVIEPILENYPNKQINEKGKEVPCNPFLKYKEEHGYIRKYSKKGNGPEIKSLKYYDSKLGNHIDITPKDSNNKVVLQSLKPWRTDVYFNKNTGKYEILGLKYSDMQFEKGTGKYSISKEQYENIKVREGVDENSEFKFTLYKNDLLLLKDSENGEQILLRFTSRNDTSKHYVELKPYNRQKFEGSEYLIKSLGTVVKGGRCIKGLGKSNISIYKVRTDVLGNQHIIKNEGDKPKLDF

SEQ ID NO: 8368 - protein, 1057 aa, synthetic construct
MNQKFILGLDIGITSVGYGLIDYETKNIIDAGVRLFPEANVENNEGRRSKRGSRRLKRRRIHRLERVKLLLTEYDLINKEQIPTSNNPYQIRVKGLSEILSKDELAIALLHLAKRRGIHNVDVAADKEETASDSLSTKDQINKNAKFLESRYVCELQKERLENEGHVRGVENRFLTKDIVREAKKIIDTQMQYYPEIDETFKEKYISLVETRREYFEGPGQGSPFGWNGDLKKWYEMLMGHCTYFPQELRSVKYAYSADLFNALNDLNNLIIQRDNSEKLEYHEKYHIIENVFKQKKKPTLKQIAKEIGVNPEDIKGYRITKSGTPEFTSFKLFHDLKKVVKDHAILDDIDLLNQIAEILTIYQDKDSIVAELGQLEYLMSEADKQSISELTGYTGTHSLSLKCMNMIIDELWHSSMNQMEVFTYLNMRPKKYELKGYQRIPTDMIDDAILSPVVKRTFIQSINVINKVIEKYGIPEDIIIELARENNSDDRKKFINNLQKKNEATRKRINEIIGQTGNQNAKRIVEKIRLHDQQEGKCLYSLESIPLEDLLNNPNHYEVDHIIPRSVSFDNSYHNKVLVKQSENSKKSNLTPYQYFNSGKSKLSYNQFKQHILNLSKSQDRISKKKKEYLLEERDINKFEVQKEFINRNLVDTRYATRELTNYLKAYFSANNMNVKVKTINGSFTDYLRKVWKFKKERNHGYKHHAEDALIIANADFLFKENKKLKAVNSVLEKPEIETKQLDIQVDSEDNYSEMFIIPKQVQDIKDFRNFKYSHRVDKKPNRQLINDTLYSTRKKDNSTYIVQTIKDIYAKDNTTLKKQFDKSPEKFLMYQHDPRTFEKLEVIMKQYANEKNPLAKYHEETGEYLTKYSKKNNGPIVKSLKYIGNKLGSHLDVTHQFKSSTKKLVKLSIKNYRFDVYLTEKGYKFVTIAYLNVFKKDNYYYIPKDKYQELKEKKKIKDTDQFIASFYKNDLIKLNGDLYKIIGVNSDDRNIIELDYYDIKYKDYCEINNIKGEPRIKKTIGKKTESIEKFTTDVLGNLYLHSTEKAPQLIFKRGL

SEQ ID NO: 8369 - protein, 1057 aa, synthetic construct
MNQKFILGLDIGITSVGYGLIDYETKNIIDAGVRLFPEANVENNEGRRSKRGSRRLKRRRIHRLERVKLLLTEYDLINKEQIPTSNNPYQIRVKGLSEILSKDELAIALLHLAKRRGIHNVDVAADKEETASDSLSTKDQINKNAKFLESRYVCELQKERLENEGHVRGVENRFLTKDIVREAKKIIDTQMQYYPEIDETFKEKYISLVETRREYFEGPGQGSPFGWNGDLKKWYEMLMGHCTYFPQELRSVKYAYSADLFNALNDLNNLIIQRDNSEKLEYHEKYHIIENVFKQKKKPTLKQIAKEIGVNPEDIKGYRITKSGTPEFTSFKLFHDLKKVVKDHAILDDIDLLNQIAEILTIYQDKDSIVAELGQLEYLMSEADKQSISELTGYTGTHSLSLKCMNMIIDELWHSSMNQMEVFTYLNMRPKKYELKGYQRIPTDMIDDAILSPVVKRTFIQSINVINKVIEKYGIPEDIIIELARENNSDDRKKFINNLQKKNEATRKRINEIIGQTGNQNAKRIVEKIRLHDQQEGKCLYSLESIPLEDLLNNPNHYEVDHIIPRSVSFDNSYHNKVLVKQSENSKKSNLTPYQYFNSGKSKLSYNQFKQHILNLSKSQDRISKKKKEYLLEERDINKFEVQKEFINRNLVDTRYATRELTSYLKAYFSANNMDVKVKTINGSFTNHLRKVWRFDKYRNHGYKHHAEDALIIANADFLFKENKKLQNTNKILEKPTIENNTKKVTVEKEEDYNNVFETPKLVEDIKQYRDYKFSHRVDKKPNRQLINDTLYSTRMKDEHDYIVQTITDIYGKDNTNLKKQFNKNPEKFLMYQNDPKTFEKLSIIMKQYSDEKNPLAKYYEETGEYLTKYSKKNNGPIVKKIKLLGNKVGNHLDVTNKYENSTKKLVKLSIKNYRFDVYLTEKGYKFVTIAYLNVFKKDNYYYIPKDKYQELKEKKKIKDTDQFIASFYKNDLIKLNGDLYKIIGVNSDDRNIIELDYYDIKYKDYCEINNIKGEPRIKKTIGKKTESIEKFTTDVLGNLYLHSTEKAPQLIFKRGL

SEQ ID NO: 8370 - protein, 677 aa, synthetic construct
TLNIEDEYRLHETSKEPDVSLGSTWLSDFPQAWAETGGMGLAVRQAPLIIPLKATSTPVSIKQYPMSQEARLGIKPHIQRLLDQGILVPCQSPWNTPLLPVKKPGTNDYRPVQDLREVNKRVEDIHPTVPNPYNLLSGLPPSHQWYTVLDLKDAFFCLRLHPTSQPLFAFEWRDPEMGISGQLTWTRLPQGFKNSPTLFNEALHRDLADFRIQHPDLILLQYVDDLLLAATSELDCQQGTRALLQTLGNLGYRASAKKAQICQKQVKYLGYLLKEGQRWLTEARKETVMGQPTPKTPRQLREFLGKAGFCRLFIPGFAEMAAPLYPLTKPGTLFNWGPDQQKAYQEIKQALLTAPALGLPDLTKPFELFVDEKQGYAKGVLTQKLGPWRRPVAYLSKKLDPVAAGWPPCLRMVAAIAVLTKDAGKLTMGQPLVILAPHAVEALVKQPPDRWLSNARMTHYQALLLDTDRVQFGPVVALNPATLLPLPEEGLQHNCLDILAEAHGTRPDLTDQPLPDADHTWYTDGSSLLQEGQRKAGAAVTTETEVIWAKALPAGTSAQRAELIALTQALKMAEGKKLNVYTDSRYAFATAHIHGEIYRRRGWLTSEGKEIKNKDEILALLKALFLPKRLSIIHCPGHQKGHSAEARGNRMADQAARKAAITETPDTSTLLIENSSP

SEQ ID NO: 8371 - protein, 1020 aa, synthetic construct
MDEYQRSLSRPLLTIMSINIEGLSLAKEELLAKMSEDISCDILCIQETHRDITMRRPKILGMQLAVERPHRQYGSAIFVRSGVAISATSLTEVNNIEILSVELDSCTVSSLYKPPGADFYFTPPTSCHNHEAHFVVGDFNSHSCVWGYDEDDRNGEAVLTWADNSRMSLLHDSKLPPSFNSGRWKRGYNPDLIFVKESISHQCTKRVLNPIPNTQHRPICCVAYAAVRPKSVPFRRRYNFNKANWTKFTETLEAAISDIEPSIENYDLFVEAVKRSSRLSIPRGCRTSYLPGLNEESLNQLQEYLRLFQENPYSDGTIAAGQKLSTALANAKKDRWIELLENLDMSKSSRKAWQLLRRLDSDPLVNPGHANVTPDQIAHQLIQNGKTNCSRIKMKINRVPELETHQLSSPLNLKELREAIKRCKTGKAPGLDDLMMEQIKHLGAKAENWLLKFYNQCLAHKQIPRAWRKTKIIAILKPGKDASNARNYRPISLLCHLYKVYERMLLNRLGPVIEPKLIAQQAGFRPGKNCTGQILHLTEHIEEGYEKGCITGTVFVDLTAAYDTVQHRKMLHKVYHITRDFDFTKTVQTLLENRSFYVEFQGQKSRWRRQKNGLPQGSVLAPTLFNIFTNDQPQPPLTKSFIYADDLGLTTQAKDFETVEKQLTNALKDLSSYYKENHLKPNPAKTQVCAFHLRNREANRKLKVTWEGQELEHCFHPKYLGVTLDRTLTYRKHCMNTKHKVAARNNILRKLTGSAWGADPQVIRTSALALSFSTAEYACPVWHKSAHAKQVDIALNETCRIITGCLKPTPVDKLYKLAGIAPPDVRREVAANGERKKVEHCESHPLHGYHPPPTRLKSRKGFMRTTTPLDVPPAAARVSLWAAKPGNSNWMAPQEGLPPGANQEWATWKSLNRLRSGVGRSKDNLARWHYLEESSTLCDCGAEQTTQHMYACPQCPASCTEEELFKATDNAVAVARFWSKTIGGGSPKKKRKVSGSETPGTSESATPESVSGWRLFKKIS

SEQ ID NO: 8372 - RNA, 1351 nt, synthetic construct
  source 1..1351: mol_type = other RNA
agggggacacggaaagagcctccccgaagattgagtgaattcagtcgggcgtcccctgggcaacgtttcttgtaagcggccgatctttccaccccaaaagcattggatgagtttacggatccgaattctcgacggatcgatccgaacaaacgacccaacacccgtgcgttttattctgtctttttattgccgatcccccggccgctttacttgtacagctcgtccatgccgagagtgatcccggcggcggtcacgaactccagcaggaccatgtgatcgcgcttctcgttggggtctttgctcagggcggactgggtgctcaggtagtggttgtcgggcagcagcacggggccgtcgccgatgggggtgttctgctggtagtggtcggcgagctgcacgctgccgtcctcgatgttgtggcggatcttgaagttcaccttgatgccgttcttctgcttgtcggccatgatatagacgttgtggctgttgtagttgtactccagcttgtgccccaggatgttgccgtcctccttgaagtcgatgcccttcagctcgatgcggttcaccagggtgtcgccctcgaacttcacctcggcgcgggtcttgtagttgccgtcgtccttgaagaagatggtgcgctcctggacgtagccttcgggcatggcggacttgaagaagtcgtgctgcttcatgtggtcggggtagcggctgaagcactgcacgccgtaggtcagggtggtcacgagggtgggccagggcacgggcagcttgccggtggtgcagatgaacttcagggtcagcttgccgtaggtggcatcgccctcgccctcgccggacacgctgaacttgtggccgtttacgtcgccgtccagctcgaccaggatgggcaccaccccggtgaacagctcctcgcccttgctcaccatggtggctttaccaacagtaccggaatgccaagcttgggtcctgtgttctggcggcaaacccgttgcgaaaaagaacgttcacggcgactactgcacttatatacggttctcccccaccctcgggaaaaaggcggagccagtacacgacatcactttcccagtttaccccgcgccaccttctctaggcaccggatcaattgccgacccctccccccaacttctcggggactgtgggcgatgtgcgctctgccctagttgcttgtgatttcttttcttttttattttatttccattatttgaaatgtatttgttgtagcaatgcttttgacacgaaataaataaaagaaaaaaaaaaaaaaaaaaaaaaaaaaaaaaaaaaaaaaaaaaaaaaaaaaaaaaaaaaaaaaaaaaaaaaaaaaaaaaaa

SEQ ID NO: 8373 - RNA, 129 nt, synthetic construct; identical to SEQ ID NO: 8280
  source 1..129: mol_type = other RNA

SEQ ID NO: 8374 - RNA, 101 nt, synthetic construct; identical to SEQ ID NO: 8281
  source 1..101: mol_type = other RNA
